(19) United States
(12) Patent Application Publication
(10) Pub. No.: US 2025/0340874 A1
(43) Pub. Date: Nov. 6, 2025

(54) COMPOUNDS AND METHODS FOR REDUCING PCDH19 EXPRESSION

(71) Applicant: Ionis Pharmaceuticals, Inc., Carlsbad, CA (US)

(72) Inventors: Ruben E. Valas, Oceanside, CA (US); Susan M. Freier, San Diego, CA (US); Jacqueline G. O'Rourke, Vista, CA (US)

(73) Assignee: Ionis Pharmaceuticals, Inc., Carlsbad, CA (US)

(21) Appl. No.: 18/722,875

(22) PCT Filed: Dec. 21, 2022
(86) PCT No.: PCT/US2022/082164

§ 371 Date: Jun. 21, 2024

Related U.S. Application Data
(60) Provisional application No. 63/292,829, filed on Dec. 22, 2021.

(51) Int. Cl. C12N 15/113

(52) U.S. Cl. CPC C12N 15/113; C12N 2310/11; C12N 2310/14; C12N 2310/315; C12N 2310/321; C12N 2310/322; C12N 2310/3231; C12N 2310/341; C12N 2310/345

(57) ABSTRACT

Provided are oligomeric agents, oligomeric compounds, methods, and pharmaceutical compositions for reducing the amount or activity of Protocadherin 19 (PCDH19) RNA in a cell or subject, and in certain instances reducing the amount of PCDH19 protein in a cell or subject. Such oligomeric agents, oligomeric compounds, methods, and pharmaceutical compositions are useful to ameliorate at least one symptom or hallmark of a neurodevelopmental disease or disorder. Such neurodevelopmental diseases or disorders include PCDH19 Epilepsy. Such symptoms or hallmarks include seizures, cognitive impairment, intellectual disabilities, autism spectrum disorder, behavioral problems, aggression, anxiety, obsessive-compulsive disorder, hyperactivity, attention deficit disorder (ADD), and attention deficit hyperactivity disorder (ADHD).

### SEQUENCE LISTING

[0001] The present application is being filed along with a Sequence Listing in electronic format. The Sequence Listing is provided as a file entitled BIOL0443SEQ.xml, created on Dec. 16, 2022, which is 1.37 MB in size. The information in the electronic format of the sequence listing is incorporated herein by reference in its entirety.

### FIELD

[0002] Provided are oligomeric agents, oligomeric compounds, methods, and pharmaceutical compositions for reducing the amount or activity of Protocadherin 19 (PCDH19) RNA in a cell or subject, and in certain instances reducing the amount of PCDH19 protein in a cell or subject. Such oligomeric agents, oligomeric compounds, methods, and pharmaceutical compositions are useful to ameliorate at least one symptom or hallmark of a neurodevelopmental disease or disorder. Such neurodevelopmental diseases or disorders include PCDH19-Epilepsy. Such symptoms or hallmarks include seizures, cognitive impairment, intellectual disabilities, autism spectrum disorder, behavioral problems, aggression, anxiety, obsessive-compulsive disorder, hyperactivity, attention deficit disorder (ADD), and attention deficit hyperactivity disorder (ADHD).

### BACKGROUND

[0003] The X-linked gene encoding Protocadherin 19 (PCDH19) is predominantly expressed in the central nervous system and has been implicated in cell-cell adhesion and synaptic function. PCDH19 mutations lead to PCDH19-associated neurodevelopmental diseases and disorders, including PCDH19-Epilepsy (also known as PCDH19-Girl Clusterng Epilepsy (GCE) Epilepsy, PCDH19 Disorder, and Mental Retardation Limited to Females (EFMR)) (Hoshima, N., et al., 2021, Science, April 16;372 (6539): eaaz3893. doi: 10.1126/science.aaz3893). PCDH19-Epilepsy is the second most common cause of epilepsy; about one in ten girls who have seizures before the age of five have PCDH19-Epilepsy. PCDH19-Epilepsy has a unique pattern of inheritance, due to random X chromosome inactivation, PCDH19-Epilepsy is associated with mosaic expression of mutant PCDH19. The mutation leads to aberrant neural development and is found in females who are heterozygous for PCDH19 mutations, and males who are mosaic carriers of somatic PCDH19 mutaions. Hemizygous males generally do not experience symptoms or have more subtle phenotypes (Thomas, P., et al., 2018, Neuron, 97, 59-66). PCDH19 mutations are associated with seizures (including clusters of seizures, generalized tonic-clonic and/or focal seizures, which may evolve to bilateral, tonic-clonic seizures), cognitive impairment, intellectual disabilities, autism spectrum disorder, behavioral problems, aggression, anxiety, obsessive-compulsive disorder, hyperactivity, attention deficit disorder (ADD), and attention deficit hyperactivity disorder (ADHD). Upon reaching adolescence, there may be a reduction or remission of seizures, however, one or more of cognitive impairment, intellectual disabilities, autism spectrum disorder, behavioral problems, aggression, anxiety, obsessive-compulsive disorder, hyperactivity, attention deficit disorder (ADD), and attention deficit hyperactivity disorder (ADHD) remain (Kolc., K. L., et al., 2019, Mol. Psych. 24, 241-251; Kolc, K. L., et al., 2020, Transl. Psych. 10, 127).

[0004] Currently there is a lack of acceptable options for treating diseases and disorders associated with PCDH19 mutations. It is therefore an objective herein to provide compounds and pharmaceutical compositions for the treatment of such diseases and disorders.

### SUMMARY

[0005] Oligomeric agents, oligomeric compounds, and pharmaceutical compositions of certain embodiments described herein are useful for reducing or inhibiting PCDH19 expression in a cell or subject. In certain embodiments, PCDH19 RNA or protein levels can be reduced in a cell or subject. Also provided are methods of treating PCDH19 Epilepsy.

### DETAILED DESCRIPTION

[0006] It is to be understood that both the foregoing general description and the following detailed description are exemplary and explanatory only and are not restrictive. Herein, the use of the singular includes the plural unless specifically stated otherwise. As used herein, the use of “or” means “and/or” unless stated otherwise. Furthermore, the use of the term “including” as well as other forms, such as “includes” and “included” is not limiting. Also, terms such as “element” or “component” encompass both elements and components comprising one unit and elements and components that comprise more than one subunit, unless specifically stated otherwise.

[0007] The section headings used herein are for organizational purposes only and are not to be construed as limiting the subject matter described. All documents, or portions of documents, cited in this application, including, but not limited to, patents, patent applications, articles, books, treatises, and GenBank, ENSEMBL, and NCBI reference sequence records, are hereby expressly incorporated-by-reference for the portions of the document discussed herein, as well as in their entirety.

### Definitions

[0008] Unless specific definitions are provided, the nomenclature used in connection with, and the procedures and techniques of, analytical chemistry, synthetic organic chemistry, and medicinal and pharmaceutical chemistry described herein are those well-known and commonly used in the art. Where permitted, all patents, applications, published applications and other publications and other data referred to throughout the disclosure are incorporated by reference herein in their entirety.

[0009] Unless otherwise indicated, the following terms have the following meanings:

[0010] As used herein, “2′-deoxynucleoside” means a nucleoside comprising a 2′-H(H) deoxyribosyl sugar moiety. In certain embodiments, a 2′-deoxynucleoside is a 2′-β-D-deoxynucleoside and comprises a 2′-β-D-deoxyribosyl sugar moiety, which has the β-D configuration as found in naturally occurring deoxyribonucleic acids (DNA). In certain embodiments, a 2′-deoxynucleoside or a nucleoside comprising an unmodified 2′-deoxyribosyl sugar moiety may comprise a modified nucleobase or may comprise an RNA nucleobase (uracil).

[0011] As used herein, “2′-MOE” means a 2′—OCH₂CH₂OCH₃ group in place of the 2′—OH group of a furanosyl sugar moiety. A “2′-MOE sugar moiety” or a “2′-O-methoxyethyl sugar moiety” means a sugar moiety with a 2′-OCH₂CH₂OCH₃ group in place of the 2′—OH group of a furanosyl sugar moiety. Unless otherwise indicated, a 2′-MOE sugar moiety is in the β-D-ribosyl configuration. “MOE” means O-methoxyethyl.

[0012] As used herein, “2′-MOE nucleoside” means a nucleoside comprising a 2′-MOE sugar moiety. As used herein, “2′-OMe” means a 2′—OCH₃ group in place of the 2′—OH group of a furanosyl sugar moiety. A″2′-O-methyl sugar moiety” or “2′-OMe sugar moiety” means a sugar moiety with a 2′—OCH₃ group in place of the 2′—OH group of a furanosyl sugar moiety. Unless otherwise indicated, a 2′-OMe sugar moiety is in the β-D-ribosyl configuration.

[0013] As used herein, “2′-OMe nucleoside” means a nucleoside comprising a 2′-OMe sugar moiety.

[0014] As used herein, “2′-F” means a 2′—F group in place of the 2′—OH group of a furanosyl sugar moiety. A″2′-O-fluoro sugar moiety” or “2′-F sugar moiety” means a sugar moiety with a 2′—OF group in place of the 2′—OH group of a furanosyl sugar moiety. Unless otherwise indicated, a 2′-F sugar moiety is in the β-D-ribosyl configuration.

[0015] As used herein, “xylo 2′-F” means a 2′-F sugar moiety in the β-D-xylosyl configuration.

[0016] As used herein, “2′-substituted nucleoside” means a nucleoside comprising a 2′-substituted furanosyl sugar moiety. As used herein, “2′-substituted” in reference to a sugar moiety means a sugar moiety comprising at least one 2′-substituent group other than H or OH.

[0017] As used herein, “3′ target site” refers to the 3′-most nucleotide of a target nucleic acid which is complementary to an antisense oligonucleotide, when the antisense oligonucleotide is hybridized to the target nucleic acid.

[0018] As used herein, “5′ target site” refers to the 5′-most nucleotide of a target nucleic acid which is complementary to an antisense oligonucleotide, when the antisense oligonucleotide is hybridized to the target nucleic acid.

[0019] As used herein, “5-methylcytosine” means a cytosine modified with a methyl group attached to the 5 position. A 5-methylcytosine is a modified nucleobase.

[0020] As used herein, “abasic sugar moiety” means a sugar moiety of a nucleoside that is not attached to a nucleobase. Such abasic sugar moieties are sometimes referred to in the art as “abasic nucleosides.”

[0021] As used herein, “administration” or “administering” means providing a pharmaceutical agent or composition to an animal.

[0022] As used herein, “ameliorate” in reference to a disease or condition means improvement in at least one symptom of the disease or condition relative to the same symptom in the absence of the treatment. In certain embodiments, amelioration is the reduction in the severity or frequency of the symptom or the delayed onset or slowing of progression in the severity or frequency of a symptom.

[0023] As used herein, “bicyclic nucleoside” or “BNA” means a nucleoside comprising a bicyclic sugar moiety.

[0024] As used herein, “bicyclic sugar” or “bicyclic sugar moiety” means a modified sugar moiety comprising two rings, wherein the second ring is formed via a bridge connecting two of the atoms in the first ring thereby forming a bicyclic structure. In certain embodiments, the first ring of the bicyclic sugar moiety is a furanosyl sugar moiety. In certain embodiments, the furanosyl sugar moiety is a ribosyl sugar moiety. In certain embodiments, the bicyclic sugar moiety does not comprise a furanosyl sugar moiety.

[0025] As used herein, “blunt” or “blunt ended” in reference to an oligomeric duplex formed by two oligonucleotides mean that there are no terminal unpaired nucleotides (i.e. no overhanging nucleotides). One or both ends of an oligomeric duplex can be blunt.

[0026] As used herein, “cell-targeting moiety” means a conjugate group or portion of a conjugate group that is capable of binding to a particular cell type or particular cell types.

[0027] As used herein, “cerebrospinal fluid” or “CSF” means the fluid filling the space around the brain and spinal cord. “Artificial cerebrospinal fluid” or “aCSF” means a prepared or manufactured fluid that has certain properties of cerebrospinal fluid.

[0028] As used herein, “cleavable moiety” means a bond or group of atoms that is cleaved under physiological conditions, for example, inside a cell, an animal, or a human.

[0029] As used herein, “complementary” in reference to an oligonucleotide means that at least 70% of the nucleobases of the oligonucleotide or one or more portions thereof and the nucleobases of another nucleic acid or one or more portions thereof are capable of hydrogen bonding with one another when the nucleobase sequence of the oligonucleotide and the other nucleic acid are aligned in opposing directions. As used herein, “complementary nucleobases” means nucleobases that are capable of forming hydrogen bonds with one another. Complementary nucleobase pairs include adenine (A) and thymine (T), adenine (A) and uracil (U), cytosine (C) and guanine (G), 5-methylcytosine (“C) and guanine (G). Certain modified nucleobases that pair with natural nucleobases or with other modified nucleobases are known in the art. For example, inosine can pair with adenosine, cytosine, or uracil. Complementary oligonucleotides and/or nucleic acids need not have nucleobase complementarity at each nucleoside. Rather, some mismatches are tolerated. As used herein, “fully complementary” or “100% complementary” in reference to an oligonucleotide, or a portion thereof, means that the oligonucleotide, or portion thereof, is complementary to another oligonucleotide or nucleic acid at each nucleobase of the shorter of the two oligonucleotides, or at each nucleoside if the oligonucleotides are the same length.

[0030] As used herein, “complementary region” in reference to an oligonucleotide is the range of nucleobases of the oligonucleotide that is complementary with a second oligonucleotide or target nucleic acid.

[0031] As used herein, “conjugate group” means a group of atoms that is directly or indirectly attached to an oligonucleotide. Conjugate groups include a conjugate moiety and a conjugate linker that attaches the conjugate moiety to the oligonucleotide.

[0032] As used herein, “conjugate linker” means a single bond or a group of atoms comprising at least one bond that connects a conjugate moiety to an oligonucleotide.

[0033] As used herein, “conjugate moiety” means a group of atoms that is attached to an oligonucleotide via a conjugate linker.

[0034] As used herein, “contiguous” in the context of an oligonucleotide refers to nucleosides, nucleobases, sugar moieties, or internucleoside linkages that are immediately adjacent to each other. For example, “contiguous nucleobases” means nucleobases that are immediately adjacent to each other in a sequence.

[0035] As used herein, “constrained ethyl” or “cEt” means a 4′ to 2′ bridge in place of the 2′OH-group of a ribosyl sugar moiety, wherein the bridge has the formula of 4′-CH(CH₃)—O-2′, and wherein the methyl group of the bridge is in the S configuration. A “cEt sugar moiety” is a bicyclic sugar moiety with a 4′ to 2′ bridge in place of the 2′OH-group of a ribosyl sugar moiety, wherein the bridge has the formula of 4′-CH(CH₃)—O-2′, and wherein the methyl group of the bridge is in the S configuration. “cEt” means constrained ethyl.

[0036] As used herein, “cEt nucleoside” means a nucleoside comprising a cEt sugar moiety.

[0037] As used herein, “chirally enriched population” means a plurality of molecules of identical molecular formula, wherein the number or percentage of molecules within the population that contain a particular stereochemical configuration at a particular chiral center is greater than the number or percentage of molecules expected to contain the same particular stereochemical configuration at the same particular chiral center within the population if the particular chiral center were stereorandom. Chirally enriched populations of molecules having multiple chiral centers within each molecule may contain one or more stereorandom chiral centers. In certain embodiments, the molecules are modified oligonucleotides. In certain embodiments, the molecules are compounds comprising modified oligonucleotides.

[0038] As used herein, “chirally controlled” in reference to an internucleoside linkage means chirality at that linkage is enriched for a particular stereochemical configuration.

[0039] As used herein, “deoxy region” means a region of 5-12 contiguous nucleotides, wherein at least 70% of the nucleosides are 2′-β-D-deoxynucleosides. In certain embodiments, each nucleoside is selected from a 2′-β-D-deoxynucleoside, a bicyclic nucleoside, and a 2′-substituted nucleoside. In certain embodiments, a deoxy region supports RNase H activity. In certain embodiments, a deoxy region is the gap or internal region of a gapmer.

[0040] As used herein, “double-stranded” in reference to a region or an oligonucleotide, means a duplex formed by complementary strands of nucleic acids (including, but not limited to oligonucleotides) hybridized to one another. In certain embodiments, the two strands of a double-stranded region are separate molecules. In certain embodiments, the two strands are regions of the same molecule that has folded onto itself (e.g., a hairpin structure).

[0041] As used herein, “duplex” or “duplex region” means the structure formed by two oligonucleotides or portions thereof that are hybridized to one another.

[0042] As used herein, “gapmer” means a modified oligonucleotide comprising an internal region having a plurality of nucleosides that support RNase H cleavage positioned between external regions having one or more nucleosides, wherein the nucleosides comprising the internal region are chemically distinct from the nucleoside or nucleosides comprising the external regions. The internal region may be referred to as the “gap” and the external regions may be referred to as the “wings” or “wing segments.” In certain embodiments, the internal region is a deoxy region. The positions of the internal region or gap refer to the order of the nucleosides of the internal region and are counted starting from the 5′-end of the internal region. Unless otherwise indicated, “gapmer” refers to a sugar motif. In certain embodiments, each nucleoside of the gap is a 2′-β-D-deoxynucleoside. In certain embodiments, the gap comprises one 2′-substituted nucleoside at position 1, 2, 3, 4, or 5 of the gap, and the remainder of the nucleosides of the gap are 2′-β-D-deoxynucleosides. As used herein, the term “MOE gapmer” indicates a gapmer having a gap comprising 2′-β-D-deoxynucleosides and wings comprising 2′-MOE nucleosides.

[0043] As used herein, the term “mixed wing gapmer” indicates a gapmer having wings comprising modified nucleosides comprising at least two different sugar modifications. Unless otherwise indicated, a gapmer may comprise one or more modified internucleoside linkages and/or modified nucleobases and such modifications do not necessarily follow the gapmer pattern of the sugar modifications.

[0044] As used herein, “hotspot region” is a range of nucleobases on a target nucleic acid that is amenable to oligomeric compound-mediated reduction of the amount or activity of the target nucleic acid.

[0045] As used herein, “hybridization” means the pairing or annealing of complementary oligonucleotides and/or nucleic acids. While not limited to a particular mechanism, the most common mechanism of hybridization involves hydrogen bonding, which may be Watson-Crick, Hoogsteen or reversed Hoogsteen hydrogen bonding, between complementary nucleobases. In certain embodiments, complementary nucleic acid molecules include, but are not limited to, an oligomeric duplex and a nucleic acid target. In certain embodiments, complementary nucleic acid molecules include, but are not limited to, an antisense oligonucleotide and a nucleic acid target.

[0046] As used herein, “internucleoside linkage” means the covalent linkage between contiguous nucleosides in an oligonucleotide. As used herein, “modified internucleoside linkage” means any internucleoside linkage other than a phosphodiester internucleoside linkage. “Phosphorothioate internucleoside linkage or “PS internucleoside linkage” is a modified internucleoside linkage in which one of the non-bridging oxygen atoms of a phosphodiester internucleoside linkage is replaced with a sulfur atom.

[0047] As used herein, “inverted nucleoside” means a nucleotide having a 3′ to 3′ and/or 5′ to 5′ internucleoside linkage, as shown herein.

[0048] As used herein, “inverted sugar moiety” means the sugar moiety of an inverted nucleoside or an abasic sugar moiety having a 3′ to 3′ and/or 5′ to 5′ internucleoside linkage.

[0049] As used herein, “linked nucleosides” are nucleosides that are connected in a contiguous sequence (i.e., no additional nucleosides are presented between those that are linked).

[0050] As used herein, “linker-nucleoside” means a nucleoside that links, either directly or indirectly, an oligonucleotide to a conjugate moiety. Linker-nucleosides are located within the conjugate linker of an oligomeric compound. Linker-nucleosides are not considered part of the oligonucleotide portion of an oligomeric compound even if they are contiguous with the oligonucleotide.

[0051] “Lipid nanoparticle” or “LNP” is a vesicle comprising a lipid layer encapsulating a pharmaceutically active molecule, such as a nucleic acid molecule, e.g., an RNAi or a plasmid from which an RNAi is transcribed. LNPs are described in, for example, U.S. Pat. Nos. 6,858,225, 6,815,432, 8,158,601, and 8,058,069, the entire contents of which are hereby incorporated herein by reference.

[0052] As used herein, “mismatch” or “non-complementary” means a nucleobase of a first nucleic acid sequence that is not complementary with the corresponding nucleobase of a second nucleic acid sequence or target nucleic acid when the first and second nucleic acid sequences are aligned in opposing directions.

[0053] As used herein, “motif” means the pattern of unmodified and/or modified sugar moieties, nucleobases, and/or internucleoside linkages, in an oligonucleotide.

[0054] As used herein, “non-bicyclic modified sugar moiety” means a modified sugar moiety that comprises a modification, such as a substituent, that does not form a bridge between two atoms of the sugar to form a second ring.

[0055] As used herein, “motif” means the pattern of unmodified and/or modified sugar moieties, nucleobases, and/or internucleoside linkages, in an oligonucleotide.

[0056] As used herein, “nucleobase” means an unmodified nucleobase or a modified nucleobase. As used herein an “unmodified nucleobase” is adenine (A), thymine (T), cytosine (C), uracil (U), or guanine (G). As used herein, a “modified nucleobase” is a group of atoms other than unmodified A, T, C, U, or G capable of pairing with at least one unmodified nucleobase. A “5-methylcytosine” is a modified nucleobase. A universal base is a modified nucleobase that can pair with any one of the five unmodified nucleobases. As used herein, “nucleobase sequence” means the order of contiguous nucleobases in a target nucleic acid or oligonucleotide independent of any sugar or internucleoside linkage modification.

[0057] As used herein, “nucleoside” means a compound, or a fragment of a compound, comprising a nucleobase and a sugar moiety. The nucleobase and sugar moiety are each, independently, unmodified or modified. As used herein, “modified nucleoside” means a nucleoside comprising a modified nucleobase and/or a modified sugar moiety. Modified nucleosides include abasic nucleosides, which lack a nucleobase. “Linked nucleosides” are nucleosides that are connected in a contiguous sequence (i.e., no additional nucleosides are presented between those that are linked).

[0058] As used herein, “nucleoside overhang” refers to unpaired nucleotides at either or both ends of a duplex formed by hybridization of two oligonucleotides.

[0059] As used herein, “oligomeric agent” means an oligomeric compound and optionally one or more additional features, such as a second oligomeric compound. An oligomeric agent may be a single-stranded oligomeric compound or may be an oligomeric duplex formed by two complementary oligomeric compounds.

[0060] As used herein, “oligomeric compound” means an oligonucleotide and optionally one or more additional features, such as a conjugate group or terminal group. An oligomeric compound may be paired with a second oligomeric compound that is complementary to the first oligomeric compound or may be unpaired. A “singled-stranded oligomeric compound” is an unpaired oligomeric compound. The term “oligomeric duplex” means a duplex formed by two oligomeric compounds having complementary nucleobase sequences. Each oligomeric compound of an oligomeric duplex may be referred to as a “duplexed oligomeric compound.”

[0061] As used herein, “oligonucleotide” means a strand of linked nucleosides connected via internucleoside linkages, wherein each nucleoside and internucleoside linkage may be modified or unmodified. Unless otherwise indicated, oligonucleotides consist of 8-50 linked nucleosides. As used herein, “modified oligonucleotide” means an oligonucleotide, wherein at least one nucleoside or internucleoside linkage is modified. As used herein, “unmodified oligonucleotide” means an oligonucleotide that does not comprise any nucleoside modifications or internucleoside modifications. An oligonucleotide may be paired with a second oligonucleotide that is complementary to the oligonucleotide or it may be unpaired. A “single-stranded oligonucleotide” is an unpaired oligonucleotide. A “double-stranded oligonucleotide” is an oligonucleotide that is paired with a second oligonucleotide.

[0062] As used herein, an “oligonucleotide duplex” means a duplex formed by two paired oligonucleotides having complementary nucleobase sequences. Each oligo of an oligonucleotide duplex is a “duplexed oligonucleotide” or a “double-stranded oligonucleotide.”

[0063] As used herein, “pharmaceutically acceptable carrier or diluent” means any substance suitable for use in administering to an animal. Certain such carriers enable pharmaceutical compositions to be formulated as, for example, tablets, pills, dragees, capsules, liquids, gels, syrups, slurries, suspension and lozenges for the oral ingestion by an animal. In certain embodiments, a pharmaceutically acceptable carrier or diluent is sterile water, sterile saline, sterile buffer solution or sterile artificial cerebrospinal fluid.

[0064] As used herein, “pharmaceutically acceptable salts” means physiologically and pharmaceutically acceptable salts of compounds. Pharmaceutically acceptable salts retain the desired biological activity of the parent compound and do not impart undesired toxicological effects thereto.

[0065] As used herein, “pharmaceutical composition” means a mixture of substances suitable for administering to an animal. For example, a pharmaceutical composition may comprise an oligomeric compound and a sterile aqueous solution. In certain embodiments, a pharmaceutical composition shows activity in free uptake assay in certain cell lines.

[0066] As used herein, “reducing the amount or activity” refers to a reduction or blockade of the transcriptional expression or activity relative to the transcriptional expression or activity in an untreated or control sample and does not necessarily indicate a total elimination of transcriptional expression or activity.

[0067] As used herein, “RNA” means an RNA transcript and includes pre-mRNA and mature mRNA unless otherwise specified.

[0068] As used herein, “RNAi agent” means an antisense agent that acts, at least in part, through RISC or Ago2 to modulate a target nucleic acid and/or protein encoded by a target nucleic acid. RNAi agents include, but are not limited to double-stranded siRNA, single-stranded RNAi (ssRNAi), and microRNA, including microRNA mimics. RNAi agents may comprise conjugate groups and/or terminal groups. In certain embodiments, an RNAi agent modulates the amount and/or activity, of a target nucleic acid. The term RNAi agent excludes antisense agents that act through RNase H.

[0069] As used herein, “RNase H agent” means an antisense agent that acts through RNase H to modulate a target nucleic acid and/or protein encoded by a target nucleic acid. In certain embodiments, RNase H agents are single-stranded. In certain embodiments, RNase H agents are double-stranded. RNase H agents may comprise conjugate groups and/or terminal groups. In certain embodiments, an RNase H agent modulates the amount and/or activity of a target nucleic acid. The term RNase H agent excludes antisense agents that act principally through RISC/Ago2.

[0070] As used herein, “self-complementary” in reference to an oligonucleotide means an oligonucleotide that at least partially hybridizes to itself.

[0071] As used herein, “single-stranded” means a nucleic acid (including but not limited to an oligonucleotide) that is unpaired and is not part of a duplex. Single-stranded compounds are capable of hybridizing with complementary nucleic acids to form duplexes, at which point they are no longer single-stranded.

[0072] As used herein, “stabilized phosphate group” means a 5′-phosphate analog that is metabolically more stable than a 5′-phosphate as naturally occurs on DNA or RNA.

[0073] As used herein, “standard cell assay” and “standard in vitro assay” are used interchangeably herein and the terms mean the assay described in Example 1 and reasonable variations thereof.

[0074] As used herein, “stereorandom chiral center” in the context of a population of molecules of identical molecular formula means a chiral center having a random stereochemical configuration. For example, in a population of molecules comprising a stereorandom chiral center, the number of molecules having the(S) configuration of the stereorandom chiral center may be but is not necessarily the same as the number of molecules having the (R) configuration of the stereorandom chiral center. The stereochemical configuration of a chiral center is considered random when it is the result of a synthetic method that is not designed to control the stereochemical configuration. In certain embodiments, a stereorandom chiral center is a stereorandom phosphorothioate internucleoside linkage.

[0075] As used herein, “subject” means a human or non-human animal. The terms “subject” “animal” and “individual” are used interchangeably. In certain embodiments, the subject is human.

[0076] As used herein, “sugar moiety” means an unmodified sugar moiety or a modified sugar moiety. As used herein, “unmodified sugar moiety” means a 2′-OH(H) β-D-ribosyl sugar moiety, as found in RNA (an “unmodified RNA sugar moiety”), or a 2′-H(H) β-D-deoxyribosyl sugar moiety, as found in DNA (an “unmodified DNA sugar moiety”). Unmodified sugar moieties have one hydrogen at each of the 1′, 3′, and 4′ positions, an oxygen at the 3′ position, and two hydrogens at the 5′ position. As used herein, “modified sugar moiety” or “modified sugar” means a modified furanosyl sugar moiety or a sugar surrogate.

[0077] As used herein, “sugar surrogate” means a modified sugar moiety having other than a furanosyl moiety that can link a nucleobase to another group, such as an internucleoside linkage, conjugate group, or terminal group in an oligonucleotide. Modified nucleosides comprising sugar surrogates can be incorporated into one or more positions within an oligonucleotide and such oligonucleotides are capable of hybridizing to complementary oligomeric compounds or target nucleic acids.

[0078] As used herein, “symptom or hallmark” means any physical feature or test result that indicates the existence or extent of a disease or disorder. In certain embodiments, a symptom is apparent to a subject or to a medical professional examining or testing said subject. In certain embodiments, a hallmark is apparent upon invasive diagnostic testing, including, but not limited to, post-mortem tests.

[0079] As used herein, “target nucleic acid” and “target RNA” mean a nucleic acid that an antisense compound is designed to affect. Target RNA means an RNA transcript and includes pre-mRNA and mature mRNA unless otherwise specified.

[0080] As used herein, “target region” means a portion of a target nucleic acid to which an oligomeric compound is designed to hybridize.

[0081] As used herein, “terminal group” means a chemical group or group of atoms that is covalently linked to a terminus of an oligonucleotide.

[0082] As used herein, “treating” means improving a subject's disease or condition by administering an oligomeric agent or oligomeric compound described herein. In certain embodiments, treating a subject improves a symptom relative to the same symptom in the absence of the treatment. In certain embodiments, treatment reduces in the severity or frequency of a symptom, or delays the onset of a symptom, slows the progression of a symptom, or slows the severity or frequency of a symptom.

[0083] As used herein, “therapeutically effective amount” means an amount of a pharmaceutical agent or composition that provides a therapeutic benefit to an animal. For example, a therapeutically effective amount improves a symptom of a disease.

[0084] As used herein, “antisense activity” means any detectable and/or measurable change attributable to the hybridization of an antisense compound to its target nucleic acid. In certain embodiments, antisense activity is a decrease in the amount or expression of a target nucleic acid or protein encoded by such target nucleic acid compared to target nucleic acid levels or target protein levels in the absence of the antisense compound. In certain embodiments, antisense activity is the modulation of splicing of a target pre-mRNA.

[0085] As used herein, “antisense agent” means an antisense compound and optionally one or more additional features, such as a sense compound.

[0086] As used herein, “antisense compound” means an antisense oligonucleotide and optionally one or more additional features, such as a conjugate group.

[0087] As used herein, “sense compound” means a sense oligonucleotide and optionally one or more additional features, such as a conjugate group.

[0088] As used herein, “antisense oligonucleotide” means an oligonucleotide, including the oligonucleotide portion of an antisense compound, that is capable of hybridizing to a target nucleic acid and is capable of at least one antisense activity. Antisense oligonucleotides include but are not limited to antisense RNAi oligonucleotides and antisense RNase H oligonucleotides.

[0089] As used herein, “sense oligonucleotide” means an oligonucleotide, including the oligonucleotide portion of a sense compound, that is capable of hybridizing to an antisense oligonucleotide.

### CERTAIN EMBODIMENTS

The present disclosure provides the following non-limiting numbered embodiments:

[0090] Embodiment 1. An oligomeric compound comprising a modified oligonucleotide consisting of 12 to 50 linked nucleosides wherein the nucleobase sequence of the modified oligonucleotide is at least 80% complementary to an equal length portion of an PCDH19 nucleic acid, and wherein the modified oligonucleotide comprises at least one modification selected from a modified sugar and a modified internucleoside linkage.

[0091] Embodiment 2. An oligomeric compound comprising a modified oligonucleotide consisting of 12 to 50 linked nucleosides, wherein the nucleobase sequence of the modified oligonucleotide comprises at least 12, at least 13, at least 14, at least 15, at least 16, at least 17, at least 18, at least 19, or 20 contiguous nucleobases of any of SEQ ID NOs: 15-482, wherein the modified oligonucleotide comprises at least one modification selected from a modified sugar and a modified internucleoside linkage.

[0092] Embodiment 3. An oligomeric compound comprising a modified oligonucleotide consisting of 12 to 50 linked nucleosides, wherein the nucleobase sequence of the modified oligonucleotide comprises at least 12, at least 13, at least 14, at least 15, or 16 contiguous nucleobases of any of SEQ ID NOs: 15-560, wherein the modified oligonucleotide comprises at least one modification selected from a modified sugar and a modified internucleoside linkage.

[0093] Embodiment 4. The oligomeric compound of embodiment 2 or embodiment 3, wherein the modified oligonucleotide has a nucleobase sequence consisting of the nucleobase sequence of any of SEQ ID NOs: 15-560.

[0094] Embodiment 5. An oligomeric compound comprising a modified oligonucleotide consisting of 12 to 50 linked nucleosides, wherein the nucleobase sequence of the modified oligonucleotide comprises at least 12, at least 13, at least 14, at least 15, at least 16, at least 17, at least 18, at least 19, at least 20, at least 21, at least 22, or at least 23 contiguous nucleobases of any of SEQ ID NOs: 561-1028, wherein the modified oligonucleotide comprises at least one modification selected from a modified sugar and a modified internucleoside linkage.

[0095] Embodiment 6. The oligomeric compound of embodiment 5, wherein the modified oligonucleotide has a nucleobase sequence consisting of the nucleobase sequence of any of SEQ ID NOs: 561-1028.

[0096] Embodiment 7. An oligomeric compound comprising a modified oligonucleotide consisting of 12 to 50 linked nucleosides and having a nucleobase sequence comprising at least 12, at least 13, at least 14, at least 15, at least 16, at least 17, at least 18, at least 19, or 20 contiguous nucleobases complementary to: an equal length portion of nucleobases 4,743-4,767 of SEQ ID NO: 1;
[0097] an equal length portion of nucleobases 12,319-12,346 of SEQ ID NO: 1;
[0098] an equal length portion of nucleobases 34,364-34,389 of SEQ ID NO: 1; or
[0099] an equal length portion of nucleobases 84,408-84,431 of SEQ ID NO: 1;
[0100] wherein the modified oligonucleotide comprises at least one modification selected from a modified sugar and a modified internucleoside linkage.

[0101] Embodiment 8. An oligomeric compound comprising a modified oligonucleotide consisting of 12 to 50 linked nucleosides and having a nucleobase sequence comprising at least 12, at least 13, at least 14, at least 15, at least 16, at least 17, at least 18, at least 19, or 20 contiguous nucleobases of a sequence selected from:
[0102] SEQ ID NO: 132, 228, 284, 330, or 440;
[0103] SEQ ID NO: 416, 72, 129, or 204;
[0104] SEQ ID NO: 371, 425, 20, or 111; or
[0105] SEQ ID NO: 367, 407, 24, 93, or 218;
   wherein the modified oligonucleotide comprises at least one modification selected from a modified sugar and a modified internucleoside linkage.

[0106] Embodiment 9. The oligomeric compound of any of embodiments 1-8, wherein the nucleobase sequence of the modified oligonucleotide is at least 80%, 85%, 90%, 95%, or 100% complementary to any of the nucleobase sequences of SEQ ID NO: 1 or SEQ ID NO: 2 when measured across the entire nucleobase sequence of the modified oligonucleotide.

[0107] Embodiment 10. The oligomeric compound of any of embodiments 1-9, wherein the modified oligonucleotide consists of 12 to 20, 12 to 25, 12 to 30, 12 to 50, 13 to 20, 13 to 25, 13 to 30, 13 to 50, 14 to 20, 14 to 25, 14 to 30, 14 to 50, 15 to 20, 15 to 25, 15 to 30, 15 to 50, 16 to 18, 16 to 20, 16 to 25, 16 to 30, 16 to 50, 17 to 20, 17 to 25, 17 to 30, 17 to 50, 18 to 20, 18 to 25, 18 to 30, 18 to 50, 19 to 20, 19 to 25, 19 to 30, 19 to 50, 20 to 25, 20 to 30, 20 to 50, 21 to 25, 21 to 30, 21 to 50, 22 to 25, 22 to 30, 22 to 50, 23 to 25, 23 to 30, or 23 to 50 linked nucleosides.

[0108] Embodiment 11. The oligomeric compound of any of embodiments 1-10, wherein the modified oligonucleotide comprises at least one modified nucleoside.

[0109] Embodiment 12. The oligomeric compound of embodiment 11, wherein the modified oligonucleotide comprises at least one modified nucleoside comprising a modified sugar moiety.

[0110] Embodiment 13. The oligomeric compound of embodiment 12, wherein the modified sugar moiety comprises a bicyclic sugar moiety.

[0111] Embodiment 14. The oligomeric compound of embodiment 13, wherein the bicyclic sugar moiety comprises a 2′-4′ bridge selected from —O—CH₂—; and —O—CH(CH₃)—.

[0112] Embodiment 15. The oligomeric compound of any of embodiments 11-14, wherein at least one modified nucleoside of the modified oligonucleotide comprises a non-bicyclic modified sugar moiety.

[0113] Embodiment 16. The oligomeric compound of embodiment 15, wherein at least one modified nucleoside of the modified oligonucleotide comprises a bicyclic sugar moiety having a 2′-4′ bridge and at least one nucleoside comprising a non-bicyclic modified sugar moiety.

[0114] Embodiment 17. The oligomeric compound of embodiment 15 or embodiment 16, wherein the non-bicyclic modified sugar moiety is a 2′-O(CH₂)₂—OCH₃ ribosyl sugar moiety, a 2′-OMe sugar moiety, or a 2′-F sugar moiety.

[0115] Embodiment 18. The oligomeric compound of any of embodiments 1-17, wherein the modified oligonucleotide comprises at least one modified nucleoside comprising a sugar surrogate.

[0116] Embodiment 19. The oligomeric compound of embodiment 18, wherein at least one modified nucleoside of the modified oligonucleotide comprises a sugar surrogate selected from morpholino and PNA.

[0117] Embodiment 20. The oligomeric compound of any of embodiments 1-19, wherein the modified oligonucleotide comprises at least one modified internucleoside linkage.

[0118] Embodiment 21. The oligomeric compound of embodiment 20, wherein each internucleoside linkage of the modified oligonucleotide is a modified internucleoside linkage.

[0119] Embodiment 22. The oligomeric compound of embodiment 20 or embodiment 21, wherein at least one internucleoside linkage is a phosphorothioate internucleoside linkage.

[0120] Embodiment 23. The oligomeric compound of embodiment 20 or 22, wherein the modified oligonucleotide comprises at least one phosphodiester internucleoside linkage.

[0121] Embodiment 24. The oligomeric compound of any of embodiments 20, 22, or 23, wherein each internucleoside linkage is independently selected from a phosphodiester internucleoside linkage or a phosphorothioate internucleoside linkage.

[0122] Embodiment 25. The oligomeric compound of any of embodiments 20 or 22-24, wherein at least 4, at least 5, at least 6, at least 7, at least 8, at least 9, at least 10, at least 11, at least 12, at least 13, at least 14, at least 15, at least 16, at least 17, at least 18, or at least 19 internucleoside linkages of the modified oligonucleotide are phosphorothioate internucleoside linkages.

[0123] Embodiment 26. The oligomeric compound of any of embodiments 20-22, 24, or 25, wherein each internucleoside linkage is a phosphorothioate internucleoside linkage.

[0124] Embodiment 27. The oligomeric compound of any of embodiments 20 or 22-26, wherein the internucleoside linkage motif of the modified oligonucleotide is selected from: 5′-sssssssssssssssssss-3′, 5′-sssssssssssssss-3′, 5′-soooossssssssssooss-3′, and ssooooooooooooooooooss; wherein each ‘o’ represents a phosphodiester internucleoside linkage and each ‘s’ represents a phosphorothioate internucleoside linkage.

[0125] Embodiment 28. The oligomeric compound of any of embodiments 1-27, wherein the modified oligonucleotide comprises a modified nucleobase.

[0126] Embodiment 29. The oligomeric compound of embodiment 28, wherein the modified nucleobase is a 5-methylcytosine.

[0127] Embodiment 30. The oligomeric compound of any of embodiments 1-29, wherein the oligomeric compound comprises a modified oligonucleotide consisting of 12-22, 12-20, 14-18, 14-20, 15-17, 15-25, 16-20, 16-18, 18-22, 18-25, 18-20, 20-25, or 21-23 linked nucleosides, or a pharmaceutically acceptable salt thereof.

[0128] Embodiment 31. The oligomeric compound of embodiment 30, wherein the modified oligonucleotide is a pharmaceutically acceptable salt comprising one or more cations selected from sodium, potassium, calcium, and magnesium.

[0129] Embodiment 32. The oligomeric compound of any of embodiments 1-31, wherein the modified oligonucleotide consists of 16 linked nucleosides.

[0130] Embodiment 33. The oligomeric compound of any of embodiments 1-31, wherein the modified oligonucleotide consists of 18 linked nucleosides.

[0131] Embodiment 34. The oligomeric compound of any of embodiments 1-31, wherein the modified oligonucleotide consists of 20 linked nucleosides.

[0132] Embodiment 35. The oligomeric compound of any of embodiments 1-31, wherein the modified oligonucleotide consists of 21 linked nucleosides.

[0133] Embodiment 36. The oligomeric compound of any of embodiments 1-31, wherein the modified oligonucleotide consists of 23 linked nucleosides.

[0134] Embodiment 37. The oligomeric compound of any of embodiments 1-35, wherein the oligomeric compound activates RNase H.

[0135] Embodiment 38. The oligomeric compound of embodiment 37, wherein the modified oligonucleotide is a gapmer.

[0136] Embodiment 39. The oligomeric compound of any of embodiments 1-34, wherein the modified oligonucleotide has a sugar motif comprising:
[0137] a 5′-region consisting of 1-6 linked 5′-region nucleosides;
[0138] a central region consisting of 6-10 linked central region nucleosides; and
[0139] a 3′-region consisting of 1-6 linked 3′-region nucleosides;
[0140] wherein the 3′-most nucleoside of the 5′-region and the 5′-most nucleoside of the 3′-region comprise modified sugar moieties, and
[0141] each of the central region nucleosides is selected from a nucleoside comprising a 2′-β-D-deoxyribosyl sugar moiety and a nucleoside comprising a 2′-substituted sugar moiety, wherein the central region comprises at least six nucleosides comprising a 2′-β-D-deoxyribosyl sugar moiety and no more than two nucleosides comprising a 2′-substituted sugar moiety.

[0142] Embodiment 40. The oligomeric compound of any of embodiments 1-39, wherein the modified oligonucleotide has a sugar motif comprising:
[0143] a 5′-region consisting of 1-6 linked 5′-region nucleosides;
[0144] a central region consisting of 6-10 linked central region nucleosides; and
[0145] a 3′-region consisting of 1-6 linked 3′-region nucleosides; wherein
[0146] each of the 5′-region nucleosides and each of the 3′-region nucleosides comprises a modified sugar moiety and each of the central region nucleosides comprises a 2′-β-D-deoxyribosyl sugar moiety.

[0147] Embodiment 41. The oligomeric compound of embodiment 40, wherein the modified oligonucleotide has a sugar motif comprising:
[0148] a 5′-region consisting of 5 linked 5′-region nucleosides;
[0149] a central region consisting of 10 linked central region nucleosides; and
[0150] a 3′-region consisting of 5 linked 3′-region nucleosides; wherein
[0151] each of the 5′-region nucleosides and each of the 3′-region nucleosides comprises a 2′-O(CH₂)₂—OCH₃ ribosyl modified sugar moiety, and each of the central region nucleosides comprises a 2′-β-D-deoxyribosyl sugar moiety.

[0152] Embodiment 42. The oligomeric compound of embodiment 40, wherein the modified oligonucleotide has a sugar motif comprising:
[0153] a 5′-region consisting of 3 linked 5′-region nucleosides;
[0154] a central region consisting of 10 linked central region nucleosides; and
[0155] a 3′-region consisting of 3 linked 3′-region nucleosides; wherein
[0156] each of the 5′-region nucleosides and each of the 3′-region nucleosides comprises a cEt sugar moiety, and each of the central region nucleosides comprises a 2′-β-D-deoxyribosyl sugar moiety.

[0157] Embodiment 43. A chirally enriched population of oligomeric compounds of any of embodiments 1-42, wherein the population is enriched for modified oligonucleotides comprising at least one particular phosphorothioate internucleoside linkage having a particular stereochemical configuration.

[0158] Embodiment 44. The chirally enriched population of embodiment 43, wherein the population is enriched for modified oligonucleotides comprising at least one particular phosphorothioate internucleoside linkage having the (Sp) or (Rp) configuration.

[0159] Embodiment 45. The chirally enriched population of embodiment 43, wherein the population is enriched for modified oligonucleotides having a particular, independently selected stereochemical configuration at each phosphorothioate internucleoside linkage.

[0160] Embodiment 46. The chirally enriched population of embodiment 43, wherein the population is enriched for modified oligonucleotides having the (Rp) configuration at one particular phosphorothioate internucleoside linkage and the (Sp) configuration at each of the remaining phosphorothioate internucleoside linkages.

[0161] Embodiment 47. The chirally enriched population of embodiment 43, wherein the population is enriched for modified oligonucleotides having at least 3 contiguous phosphorothioate internucleoside linkages in the Sp, Sp, and Rp configurations, in the 5′ to 3′ direction.

[0162] Embodiment 48. A population of oligomeric compounds of any of embodiments 1-42, wherein all of the phosphorothioate internucleoside linkages of the modified oligonucleotide are stereorandom.

[0163] Embodiment 49. An oligomeric duplex, comprising a first oligomeric compound and a second oligomeric compound comprising a second modified oligonucleotide, wherein the first oligomeric compound is an oligomeric compound of any of embodiments 1-42.

[0164] Embodiment 50. The oligomeric duplex of embodiment 49, wherein the second oligomeric compound comprises a second modified oligonucleotide consisting of 12 to 50 linked nucleosides, and wherein the nucleobase sequence of the second modified oligonucleotide comprises a complementary region of at least 12 nucleobases that is at least 90% complementary to an equal length portion of the first modified oligonucleotide.

[0165] Embodiment 51. An oligomeric duplex comprising:
[0166] a first oligomeric compound comprising a first modified oligonucleotide consisting of 19 to 30 linked nucleosides wherein the nucleobase sequence of the first modified oligonucleotide comprises at least 12, at least 13, at least 14, at least 15, at least 16, at least 17, at least 18, at least 19, at least 20, at least 21, at least 22, or at least 23 contiguous nucleobases of the nucleobase sequence of any of SEQ ID NOs: 561-1028; and
[0167] a second oligomeric compound comprising a second modified oligonucleotide consisting of 15 to 30 linked nucleosides wherein the nucleobase sequence of the second modified oligonucleotide comprises a complementary region of at least 12 nucleobases that is at least 90% complementary to an equal length portion of the first modified oligonucleotide.

[0168] Embodiment 52. An oligomeric duplex comprising:
[0169] a first oligomeric compound comprising a first modified oligonucleotide consisting of 19 to 30 linked nucleosides wherein the nucleobase sequence of the first modified oligonucleotide comprises at least 12, at least 13, at least 14, at least 15, at least 16, at least 17, at least 18, at least 19, at least 20, at least 21, at least 22, or at least 23 contiguous nucleobases of the nucleobase sequence of any of SEQ ID NOs: 561-1028; and
   [0170] a second oligomeric compound comprising a second modified oligonucleotide consisting of 15 to 30 linked nucleosides wherein the nucleobase sequence of the second modified oligonucleotide comprises at least 12, at least 13, at least 14, at least 15, at least 16, at least 17, at least 18, at least 19, at least 20, or at least 21 contiguous nucleobases of the nucleobase sequence of any of SEQ ID NOs: 1029-1496, wherein the nucleobase sequence of the second modified oligonucleotide is at least 90% complementary to an equal length portion of the first modified oligonucleotide.

[0171] Embodiment 53. An oligomeric duplex comprising:
[0172] a first oligomeric compound comprising a first modified oligonucleotide consisting of 23 linked nucleosides wherein the nucleobase sequence of the first modified oligonucleotide comprises the nucleobase sequence of any of SEQ ID NOs: 561-1028; and
[0173] a second oligomeric compound comprising a second modified oligonucleotide consisting of 21 linked nucleosides wherein the nucleobase sequence of the second modified oligonucleotide comprises the nucleobase sequence of any of SEQ ID NOs: 1029-1496, wherein the nucleobase sequence of the second modified oligonucleotide is at least 90% complementary to an equal length portion of the first modified oligonucleotide.

[0174] Embodiment 54. The oligomeric duplex of any of embodiments 49-53, wherein the modified oligonucleotide of the first oligomeric compound comprises a 5′-stabilized phosphate group.

[0175] Embodiment 55. The oligomeric duplex of embodiment 54, wherein the 5′-stabilized phosphate group comprises a cyclopropyl phosphonate or a vinyl phosphonate.

[0176] Embodiment 56. The oligomeric duplex of any of embodiments 49-53, wherein the modified oligonucleotide of the first oligomeric compound comprises a glycol nucleic acid (GNA) sugar surrogate.

[0177] Embodiment 57. The oligomeric duplex of any of embodiments 49-55, wherein the modified oligonucleotide of the first oligomeric compound comprises a 2′-NMA sugar moiety.

[0178] Embodiment 58. The oligomeric duplex of any of embodiments 49-57, wherein at least one nucleoside of the second modified oligonucleotide comprises a modified sugar moiety.

[0179] Embodiment 59. The oligomeric duplex of embodiment 58, wherein the modified sugar moiety of the second modified oligonucleotide comprises a bicyclic sugar moiety.

[0180] Embodiment 60. The oligomeric duplex of embodiment 59, wherein the bicyclic sugar moiety of the second modified oligonucleotide comprises a 2′-4′ bridge selected from —O—CH₂—; and —O—CH(CH₃)—.

[0181] Embodiment 61. The oligomeric duplex of embodiment 59 or embodiment 60, wherein the modified sugar moiety of the second modified oligonucleotide comprises a non-bicyclic modified sugar moiety.

[0182] Embodiment 62. The oligomeric duplex of embodiment 61, wherein the non-bicyclic modified sugar moiety of the second modified oligonucleotide is a 2′-MOE sugar moiety, a 2′-F sugar moiety, or 2′-OMe sugar moiety.

[0183] Embodiment 63. The oligomeric duplex of any of embodiments 49-62, wherein at least one nucleoside of the second modified oligonucleotide comprises a sugar surrogate.

[0184] Embodiment 64. The oligomeric duplex of any of embodiments 49-63, wherein the second modified oligonucleotide comprises at least one modified internucleoside linkage.

[0185] Embodiment 65. The oligomeric duplex of embodiment 64, wherein at least one modified internucleoside linkage of the second modified oligonucleotide is a phosphorothioate internucleoside linkage.

[0186] Embodiment 66. The oligomeric duplex of any of embodiments 49-65, wherein the second modified oligonucleotide comprises at least one phosphodiester internucleoside linkage.

[0187] Embodiment 67. The oligomeric duplex of any of embodiments 49-66, wherein each internucleoside linkage of the second modified oligonucleotide is independently selected from a phosphodiester or a phosphorothioate internucleoside linkage.

[0188] Embodiment 68. The oligomeric duplex of any of embodiments 49-67, wherein the internucleoside linkage motif of the first modified oligonucleotide is ssooooooooooooooooooss and the internucleoside linkage motif of the second modified oligonucleotide is ssooooooooooooooooss, wherein each “o” represents a phosphodiester internucleoside linkage and each “s” represents a phosphorothioate internucleoside linkage.

[0189] Embodiment 69. The oligomeric duplex of any of embodiments 49-68, wherein the second modified oligonucleotide comprises at least one modified nucleobase.

[0190] Embodiment 70. The oligomeric duplex of embodiment 69, wherein the modified nucleobase of the second modified oligonucleotide is 5-methylcytosine.

[0191] Embodiment 71. The oligomeric duplex of any of embodiments 49-70, wherein the second modified oligonucleotide comprises a conjugate group.

[0192] Embodiment 72. The oligomeric duplex of embodiment 71, wherein the conjugate group comprises a conjugate linker and a conjugate moiety.

[0193] Embodiment 73. The oligomeric duplex of embodiment 71 or embodiment 72, wherein the conjugate group is attached to the second modified oligonucleotide at the 5′-end of the second modified oligonucleotide.

[0194] Embodiment 74. The oligomeric duplex of embodiment 71 or embodiment 72, wherein the conjugate group is attached to the second modified oligonucleotide at the 3′-end of the modified oligonucleotide.

[0195] Embodiment 75. The oligomeric duplex of embodiment 71 or embodiment 72, wherein the conjugate group is attached to the second modified oligonucleotide through a modified internucleoside linkage.

[0196] Embodiment 76. The oligomeric duplex of any of embodiments 71-75, wherein the conjugate group comprises a C22 alkyl, C20 alkyl, C16 alkyl, C10 alkyl, C21 alkyl, C19 alkyl, C18 alkyl, C15 alkyl, C14 alkyl, C13 alkyl, C12 alkyl, C11 alkyl, C9 alkyl, C8 alkyl, C7 alkyl, C6 alkyl, C5 alkyl, C22 alkenyl, C20 alkenyl, C16 alkenyl, C10 alkenyl, C21 alkenyl, C19 alkenyl, C18 alkenyl, C15 alkenyl, C14 alkenyl, C13 alkenyl, C12 alkenyl, C11 alkenyl, C9 alkenyl, C8 alkenyl, C7 alkenyl, C6 alkenyl, or C5 alkenyl.

[0197] Embodiment 77. The oligomeric duplex of any of embodiments 71-76, wherein the conjugate moiety is a 6-palmitamidohexyl conjugate moiety.

[0198] Embodiment 78. The oligomeric duplex of any of embodiments 71-74, wherein the conjugate group has the following structure:

[chemical structure]

[0199] Embodiment 79. The oligomeric duplex of any of embodiments 71-78, wherein the conjugate group comprises a cell-targeting moiety.

[0200] Embodiment 80. The oligomeric duplex of any of embodiments 49-79, wherein the second modified oligonucleotide comprises a terminal group.

[0201] Embodiment 81. The oligomeric duplex of embodiment 80, wherein the terminal group is an abasic sugar moiety.

[0202] Embodiment 82. The oligomeric duplex of any of embodiments 49-81, wherein the second modified oligonucleotide consists of 12 to 20, 12 to 25, 12 to 30, 12 to 50, 13 to 20, 13 to 25, 13 to 30, 13 to 50, 14 to 20, 14 to 25, 14 to 30, 14 to 50, 15 to 20, 15 to 25, 15 to 30, 15 to 50, 16 to 18, 16 to 20, 16 to 25, 16 to 30, 16 to 50, 17 to 20, 17 to 25, 17 to 30, 17 to 50, 18 to 20, 18 to 25, 18 to 30, 18 to 50, 19 to 20, 19 to 25, 19 to 30, 19 to 50, 20 to 25, 20 to 30, 20 to 50, 21 to 25, 21 to 30, 21 to 50, 22 to 25, 22 to 30, 22 to 50, 23 to 25, 23 to 30, or 23 to 50 linked nucleosides.

[0203] Embodiment 83. The oligomeric duplex of any of embodiments 49-81, wherein the modified oligonucleotide of the first oligomeric compound consists of 23 linked nucleosides and the second modified oligonucleotide consists of 21 linked nucleosides.

[0204] Embodiment 84. The oligomeric duplex of embodiment 83, wherein the modified oligonucleotide of the first oligomeric compound has a sugar motif (from 5′ to 3′) of: yfyyyfyyyyyyyfyfyyyyyyy and the second modified oligonucleotide has a sugar motif (from 5′ to 3′) of: yyyyyyfyfffyyyyyyyyyy, wherein each “y” represents a 2′-OMe sugar moiety and each “f” represents a 2′-F sugar moiety.

[0205] Embodiment 85. An antisense agent comprising an antisense compound, wherein the antisense compound is the oligomeric compound of any of embodiments 1-42.

[0206] Embodiment 86. An antisense agent, wherein the antisense agent is the oligomeric duplex of any of embodiments 49-84.

[0207] Embodiment 87. The antisense agent of embodiment 85 or embodiment 86, wherein the antisense agent is:
[0208] i. an RNase H agent capable of reducing the amount of PCDH19 nucleic acid through the activation of RNase H; or
[0209] ii. an RNAi agent capable of reducing the amount of PCDH19 nucleic acid through the activation of RISC/Ago2.

[0210] Embodiment 88. The antisense agent of any of embodiments 85-87, wherein the conjugate group is a cell-targeting moiety.

[0211] Embodiment 89. A pharmaceutical composition comprising an oligomeric compound of any of embodiments 1-42, a population of any of embodiments 43-48, an oligomeric duplex of any of embodiments 49-84, or an antisense agent of any of embodiments 85-88, and a pharmaceutically acceptable diluent.

[0212] Embodiment 90. The pharmaceutical composition of embodiment 89, wherein the pharmaceutically acceptable diluent is artificial cerebrospinal fluid (aCSF) or PBS.

[0213] Embodiment 91. The pharmaceutical composition of embodiment 90, wherein the pharmaceutical composition consists essentially of the oligomeric compound, the population, the oligomeric duplex, or the antisense agent, and aCSF.

[0214] Embodiment 92. The pharmaceutical composition of embodiment 90, wherein the pharmaceutical composition consists essentially of the oligomeric compound, the population, the oligomeric duplex, or the antisense agent, and PBS.

[0215] Embodiment 93. A method comprising administering to a subject an oligomeric compound of any of embodiments 1-42, a population of any of embodiments 43-48, an oligomeric duplex of any of embodiments 49-84, an antisense agent of any of embodiments 85-88, or a pharmaceutical composition of any of embodiments 89-92.

[0216] Embodiment 94. The method of embodiment 93, wherein the subject has a disease associated with PCDH19.

[0217] Embodiment 95. The method of embodiment 93, wherein the subject has PCDH19 Epilepsy.

[0218] Embodiment 96. A method of treating a disease associated with PCDH19 comprising administering to a subject having or at risk for developing a disease associated with PCDH19 a therapeutically effective amount of an oligomeric compound of any of embodiments 1-42, a population of any of embodiments 43-48, an oligomeric duplex of any of embodiments 49-84, an antisense agent of any of embodiments 85-88, or a pharmaceutical composition of any of embodiments 89-92; and thereby treating the disease associated with PCDH19.

[0219] Embodiment 97. The method of embodiment 96, wherein the disease associated with PCDH19 is a neurodevelopmental disease.

[0220] Embodiment 98. The method of embodiment 96 or embodiment 97, wherein the disease associated with PCDH19 is PCDH19 Epilepsy.

[0221] Embodiment 99. The method of any of embodiments 96-98, wherein at least one symptom or hallmark of the disease associated with PCDH19 is ameliorated.

[0222] Embodiment 100. The method of embodiment 99, wherein the symptom or hallmark is seizures, cognitive impairment, intellectual disabilities, autism spectrum disorder, behavioral problems, aggression, anxiety, obsessive-compulsive disorder, hyperactivity, attention deficit disorder (ADD), or attention deficit hyperactivity disorder (ADHD).

[0223] Embodiment 101. The method of embodiment 100, wherein the seizures are any of clusters of seizures, generalized tonic-clonic seiaures, focal seizures, or bilateral seizures.

[0224] Embodiment 102. The method of any of embodiments 96-101, wherein administering an oligomeric compound of any of embodiments 1-42, a population of any of embodiments 43-48, an oligomeric duplex of any of embodiments 49-84, an antisense agent of any of embodiments 85-88, or a pharmaceutical composition of any of embodiments 89-92 reduces seizures, reduces or delays cognitive impairment, reduces or delays intellectual disabilities, reduces or delays symptoms of autism spectrum disorder, reduces behavioral problems, reduces aggression, reduces anxiety, reduces obsessive-compulsive behavior, reduces hyperactivity, reduces symptoms of attention deficit disorder (ADD), or reduces symptoms of attention deficit hyperactivity disorder (ADHD) in the subject.

[0225] Embodiment 103. The method of any of embodiments 93-102, wherein the subject is human.

[0226] Embodiment 104. A method of reducing expression of PCDH19 in a cell comprising contacting the cell with an oligomeric compound of any of embodiments 1-42, a population of any of embodiments 43-48, an oligomeric duplex of any of embodiments 49-84, an antisense agent of any of embodiments 85-88, or a pharmaceutical composition of any of embodiments 89-92.

[0227] Embodiment 105. The method of embodiment 104, wherein the cell is a neuron.

[0228] Embodiment 106. The method of embodiment 104 or embodiment 105, wherein the cell is a human cell.

[0229] Embodiment 107. Use of an oligomeric compound of any of embodiments 1-42, a population of any of embodiments 43-48, an oligomeric duplex of any of embodiments 49-84, an antisense agent of any of embodiments 85-88, or a pharmaceutical composition of any of embodiments 89-92 for treating a disease associated with PCDH19.

[0230] Embodiment 108. Use of an oligomeric compound of any of embodiments 1-42, a population of any of embodiments 43-48, an oligomeric duplex of any of embodiments 49-84, or an antisense agent of any of embodiments 85-88 in the manufacture of a medicament for treating a disease associated with PCDH19.

[0231] Embodiment 109. The use of embodiment 107 or embodiment 108, wherein the disease associated with PCDH19 is PCDH19 Epilepsy.

### Certain Oligomeric Agents and Oligomeric Compounds

[0232] Certain embodiments provide oligomeric agents targeted to a PCDH19 nucleic acid. In certain embodiments, the PCDH19 nucleic acid has the sequence set forth in SEQ ID NO: 1 (ENSEMBL Accession No. ENSG00000165194.15 from version 104: May 2021), to SEQ ID NO: 2 (the cDNA of ENSEMBL Accession No. ENST00000373034.8 from version 104: May2021), or to both., each of which is incorporated by reference in its entirety. In certain embodiments, the oligomeric agent is a single-stranded oligomeric compound. In certain embodiments, the oligomeric agent is oligomeric duplex.

[0233] Certain embodiments provide an oligomeric compound comprising a modified oligonucleotide consisting of 12 to 50 linked nucleosides, wherein the nucleobase sequence of the modified oligonucleotide is at least 80% complementary to an equal length portion of a PCDH19 nucleic acid, and wherein the modified oligonucleotide has at least one modification selected from a modified sugar moiety and a modified internucleoside linkage. In certain embodiments, the PCDH19 nucleic acid has the nucleobase sequence of SEQ ID NOs: 1 or 2.

[0234] Certain embodiments provide an oligomeric compound comprising a modified oligonucleotide consisting of 12 to 50 linked nucleosides, wherein the nucleobase sequence of the modified oligonucleotide comprises at least 12, at least 13, at least 14, at least 15, or at least 16 contiguous nucleobases of any of the nucleobase sequences of SEQ ID NOs: 15-560.

[0235] Certain embodiments provide an oligomeric compound comprising a modified oligonucleotide consisting of 12 to 50 linked nucleosides, wherein the nucleobase sequence of the modified oligonucleotide comprises at least 12, at least 13, at least 14, at least 15, at least 16, at least 17, at least 18, at least 19, or 20 contiguous nucleobases of any of the nucleobase sequences of SEQ ID NOs: 15-482

[0236] Certain embodiments provide an oligomeric compound comprising a modified oligonucleotide consisting of 16 to 50 linked nucleosides, wherein the nucleobase sequence of the modified oligonucleotide comprises the nucleobase sequence of any of nucleobase sequences of SEQ ID NOs: 15-560.

[0237] Certain embodiments provide an oligomeric compound comprising a modified oligonucleotide consisting of 20 linked nucleosides, wherein the modified oligonucleotide has a nucleobase sequence consisting of the nucleobase sequence of any of the nucleobase sequences of SEQ ID NOs: 15-482.

[0238] Certain embodiments provide an oligomeric compound comprising a modified oligonucleotide consisting of 16 linked nucleosides, wherein the modified oligonucleotide has a nucleobase sequence consisting of the nucleobase sequence of any of the nucleobase sequences of SEQ ID NOs: 483-560.

[0239] In any of the oligomeric compounds provided herein, the nucleobase sequence of the modified oligonucleotide can be at least 85%, at least 90%, at least 95%, or 100% complementary to an equal length portion of a PCDH19 nucleic acid, wherein the PCDH19 nucleic acid has the nucleobase sequence of SEQ ID NOs: 1 or 2.

[0240] In any of the oligomeric compounds provided herein, the modified oligonucleotide can consist of 12 to 20, 12 to 25, 12 to 30, 12 to 50, 13 to 20, 13 to 25, 13 to 30, 13 to 50, 14 to 20, 14 to 25, 14 to 30, 14 to 50, 15 to 20, 15 to 25, 15 to 30, 15 to 50, 16 to 18, 16 to 20, 16 to 25, 16 to 30, 16 to 50, 17 to 20, 17 to 25, 17 to 30, 17 to 50, 18 to 20, 18 to 25, 18 to 30, 18 to 50, 19 to 20, 19 to 25, 19 to 30, 19 to 50, 20 to 25, 20 to 30, 20 to 50, 21 to 25, 21 to 30, 21 to 50, 22 to 25, 22 to 30, 22 to 50, 23 to 25, 23 to 30, or 23 to 50 linked nucleosides.

[0241] In any of the oligomeric compounds provided herein, at least one nucleoside of the modified oligonucleotide can comprise a modified sugar moiety. In certain embodiments, the modified sugar moiety comprises a bicyclic sugar moiety, such as a 2′-4′ bridge selected from —O—CH₂—; and —O—CH(CH₃)—. In certain embodiments, the modified sugar moiety comprises a non-bicyclic sugar moiety, such as a 2′-MOE sugar moiety or 2′-OMe sugar moiety.

[0242] In any of the oligomeric compounds provided herein, at least one nucleoside of the modified oligonucleotide compound can comprise a sugar surrogate.

[0243] In any of the oligomeric compounds provided herein, at least one internucleoside linkage of the modified oligonucleotide can comprise a modified internucleoside linkage, such as a phosphorothioate internucleoside linkage. In certain embodiments, each internucleoside linkage of the modified oligonucleotide can be a modified internucleoside linkage or each internucleoside linkage of the modified oligonucleotide can be a phosphorothioate internucleoside linkage. In certain embodiments, at least one internucleoside linkage of the modified oligonucleotide can be a phosphodiester internucleoside linkage. In certain embodiments, each internucleoside linkage of the modified oligonucleotide can be independently selected from a phosphodiester or a phosphorothioate internucleoside linkage. In certain embodiments, at least 2, at least 3, at least 4, at least 5, or at least 6 internucleoside linkages of the modified oligonucleotide can be phosphodiester internucleoside linkages. In certain embodiments, at least 10, at least 11, at least 12, at least 13, at least 14, at least 15, at least 16, at least 17, or at least 18 internucleoside linkages of the modified oligonucleotide can be phosphorothioate internucleoside linkages.

[0244] In any of the oligomeric compounds provided herein, at least one nucleobase of the modified oligonucleotide can be a modified nucleobase, such as 5-methylcytosine. In certain embodiments, each cytosine is 5-methylcytosine.

[0245] In any of the oligomeric compounds provided herein, the modified oligonucleotide can comprise a deoxy region consisting of 5-12 contiguous 2′-deoxynucleosides. In certain embodiments, each nucleoside of the deoxy region is a 2′-β-D-deoxynucleoside. In certain embodiments, the deoxy region consists of 7, 8, 9, 10, or 7-10 linked nucleosides. In certain embodiments, each nucleoside immediately adjacent to the deoxy region comprises a modified sugar moiety. In certain embodiments, the deoxy region is flanked on the 5′-side by a 5′-region consisting of 1-6 linked 5′-region nucleosides and on the 3′-side by a 3′-region consisting of 1-6 linked 3′-region nucleosides; wherein the 3′-most nucleoside of the 5′-region comprises a modified sugar moiety; and the 5′-most nucleoside of the 3′-region comprises a modified sugar moiety. In certain embodiments, each nucleoside of the 3′-region comprises a modified sugar moiety. In certain embodiments, each nucleoside of the 5′-region comprises a modified sugar moiety.

[0246] In certain embodiments, a compound comprises or consists of a modified oligonucleotide consisting of 16 to 50 linked nucleobases and having a nucleobase sequence comprising the nucleobase sequence recited in any one of SEQ ID NOs: 483-560, wherein the modified oligonucleotide has:
[0247] a gap segment consisting of ten linked 2′-deoxynucleosides;
[0248] a 5′ wing segment consisting of three linked nucleosides; and
[0249] a 3′ wing segment consisting of three linked nucleosides;
[0250] wherein the gap segment is positioned between the 5′ wing segment and the 3′ wing segment; wherein each nucleoside of each wing segment comprises a cEt nucleoside; wherein each internucleoside linkage is a phosphorothioate linkage; and wherein each cytosine is a 5-methylcytosine. In certain embodiments, the modified oligonucleotide consists of 16 to 30 linked nucleosides. In certain embodiments, the modified oligonucleotide consists of 16 linked nucleosides.

[0251] In certain embodiments, a compound comprises or consists of a modified oligonucleotide consisting of 16 to 50 linked nucleobases and having a nucleobase sequence comprising the nucleobase sequence recited in any one of SEQ ID NOs: 15-482, wherein the modified oligonucleotide has:
[0252] a gap segment consisting of ten linked 2′-deoxynucleosides;
[0253] a 5′ wing segment consisting of five linked nucleosides; and
[0254] a 3′ wing segment consisting of five linked nucleosides;
[0255] wherein the gap segment is positioned between the 5′ wing segment and the 3′ wing segment; wherein each nucleoside of each wing segment comprises a 2′-MOE nucleoside, and wherein each cytosine is a 5-methylcytosine. In certain embodiments, the modified oligonucleotide consists of 16 to 30 linked nucleosides. In certain embodiments, the modified oligonucleotide consists of 20 linked nucleosides wherein the internucleoside linkage motif for the modified oligonucleotide is (from 5′ to 3′): soooossssssssssooss; wherein each “s” represents a phosphorothioate internucleoside linkage and each “o” represents a phosphodiester internucleoside linkage.

[0256] In certain embodiments, an oligomeric compound comprises a conjugate group. In certain embodiments, the conjugate group comprises a conjugate linker and a conjugate moiety. In certain embodiments, the conjugate linker consists of a single bond, the conjugate linker is cleavable, the conjugate linker comprises 1-3 linker-nucleosides, the conjugate linker does not comprise any linker nucleosides, the conjugate group is attached to the modified oligonucleotide at the 5′-end of the modified oligonucleotide, or the conjugate group is attached to the modified oligonucleotide at the 3′-end of the modified oligonucleotide.

[0257] In certain embodiments, the conjugate group comprises a cell-targeting moiety having an affinity for transferrin receptor (TfR), also known as TfR1 and CD71. In certain embodiments, the conjugate group comprises an anti-TfR1 antibody or fragment thereof. In certain embodiments, the conjugate group comprises a protein or peptide capable of binding TfR1. In certain embodiments, the conjugate group comprises an aptamer capable of binding TfR1. In certain embodiments, conjugate groups may be selected from any of a C22 alkyl, C20 alkyl, C16 alkyl, C10 alkyl, C21 alkyl, C19 alkyl, C18 alkyl, C15 alkyl, C14 alkyl, C13 alkyl, C12 alkyl, C11 alkyl, C9 alkyl, C8 alkyl, C7 alkyl, C6 alkyl, C5 alkyl, C22 alkenyl, C20 alkenyl, C16 alkenyl, C10 alkenyl, C21 alkenyl, C19 alkenyl, C18 alkenyl, C15 alkenyl, C14 alkenyl, C13 alkenyl, C12 alkenyl, C11 alkenyl, C9 alkenyl, C8 alkenyl, C7 alkenyl, C6 alkenyl, or C5 alkenyl. In certain embodiments, conjugate groups may be selected from any of C22 alkyl, C20 alkyl, C16 alkyl, C10 alkyl, C21 alkyl, C19 alkyl, C18 alkyl, C15 alkyl, C14 alkyl, C13 alkyl, C12 alkyl, C11 alkyl, C9 alkyl, C8 alkyl, C7 alkyl, C6 alkyl, and C5 alkyl, where the alkyl chain has one or more unsaturated bonds.

[0258] In certain embodiments, the conjugate group has the following structure:

[chemical structure]

### Certain Oligomeric Duplexes

[0259] Certain embodiments are directed to oligomeric duplexes comprising a first oligomeric compound and a second oligomeric compound.

[0260] In certain embodiments, an oligomeric duplex comprises:
[0261] a first oligomeric compound comprising a first modified oligonucleotide consisting of 12 to 50 linked nucleosides wherein the nucleobase sequence of the first modified oligonucleotide comprises at least at least 12, at least 13, at least 14, at least 15, at least 16, at least 17, at least 18, at least 19, or 20 contiguous nucleobases of the nucleobase sequence of any of SEQ ID NOs: 15-560; and
[0262] a second oligomeric compound comprising a second modified oligonucleotide consisting of 12 to 50 linked nucleosides wherein the nucleobase sequence of the second modified oligonucleotide comprises a complementary region of at least 8 nucleobases that is at least 90% complementary to an equal length portion of the first modified oligonucleotide.

[0263] In certain embodiments, the first oligomeric compound is an antisense compound. In certain embodiments, the first modified oligonucleotide is an antisense oligonucleotide. In certain embodiments, the second oligomeric compound is a sense compound. In certain embodiments, the second modified oligonucleotide is a sense oligonucleotide.

[0264] In certain embodiments, an oligomeric duplex comprises:
[0265] a first oligomeric compound comprising a first modified oligonucleotide consisting of 16 to 50 linked nucleosides wherein the nucleobase sequence of the first modified oligonucleotide comprises the nucleobase sequence of any of SEQ ID NOs: 15-560; and
[0266] a second oligomeric compound comprising a second modified oligonucleotide consisting of 16 to 50 linked nucleosides wherein the nucleobase sequence of the second modified oligonucleotide comprises a complementary region of at least 16 nucleobases that is at least 90% complementary to an equal length portion of the first modified oligonucleotide.

[0267] In certain embodiments, the first oligomeric compound is an antisense compound. In certain embodiments, the first modified oligonucleotide is an antisense oligonucleotide. In certain embodiments, the second oligomeric compound is a sense compound. In certain embodiments, the second modified oligonucleotide is a sense oligonucleotide.

[0268] In certain embodiments, an oligomeric duplex comprises:
[0269] a first oligomeric compound comprising a first modified oligonucleotide consisting of 19 to 30linked nucleosides wherein the nucleobase sequence of the first modified oligonucleotide comprises at least 8, at least 9, at least 10, at least 11, at least 12, at least 13, at least 14, at least 15, at least 16, at least 17, at least 18, at least 19, at least 20, at least 21, at least 22, or at least 23 contiguous nucleobases of the nucleobase sequence of any of SEQ ID NOs: 561-1028, and
[0270] a second oligomeric compound comprising a second modified oligonucleotide consisting of 15 to 30 linked nucleosides wherein the nucleobase sequence of the second modified oligonucleotide comprises a complementary region of at least 8 nucleobases that is at least 90% complementary to an equal length portion of the first modified oligonucleotide.

[0271] In certain embodiments, the first oligomeric compound is an antisense compound. In certain embodiments, the first modified oligonucleotide is an antisense oligonucleotide. In certain embodiments, the second oligomeric compound is a sense compound. In certain embodiments, the second modified oligonucleotide is a sense oligonucleotide.

[0272] In certain embodiments, an oligomeric duplex comprises:
[0273] a first oligomeric compound comprising a first modified oligonucleotide consisting of 19 to 30 linked nucleosides wherein the nucleobase sequence of the first modified oligonucleotide comprises at least 8, at least 9, at least 10, at least 11, at least 12, at least 13, at least 14, at least 15, at least 16, at least 17, at least 18, at least 19, at least 20, at least 21, at least 22, or at least 23 contiguous nucleobases of the nucleobase sequence of any of SEQ ID NOs: 561-1028, and
[0274] a second oligomeric compound comprising a second modified oligonucleotide consisting of 15 to 30 linked nucleosides wherein the nucleobase sequence of the second modified oligonucleotide comprises at least 8, at least 9, at least 10, at least 11, at least 12, at least 13, at least 14, at least 15, at least 16, at least 17, at least 18, at least 19, at least 20, or at least 21 contiguous nucleobases of the nucleobase sequence of any of SEQ ID NOs: 1029-1496, wherein the nucleobase sequence of the second modified oligonucleotide is at least 90% complementary to an equal length portion of the first modified oligonucleotide.

[0275] In certain embodiments, the first oligomeric compound is an antisense compound. In certain embodiments, the first modified oligonucleotide is an antisense oligonucleotide. In certain embodiments, the second oligomeric compound is a sense compound. In certain embodiments, the second modified oligonucleotide is a sense oligonucleotide.

[0276] In certain embodiments, an oligomeric duplex comprises:
[0277] a first oligomeric compound comprising a first modified oligonucleotide consisting of 23 linked nucleosides wherein the nucleobase sequence of the first modified oligonucleotide comprises the nucleobase sequence of any of SEQ ID NOs: 561-1028; and
[0278] a second oligomeric compound comprising a second modified oligonucleotide consisting of 21 linked nucleosides wherein the nucleobase sequence of the second modified oligonucleotide comprises the nucleobase sequence of any of SEQ ID NOs: 1029-1496, wherein the nucleobase sequence of the second modified oligonucleotide is at least 90% complementary to an equal length portion of the first modified oligonucleotide.

[0279] In certain embodiments, the first oligomeric compound is an antisense compound. In certain embodiments, the first modified oligonucleotide is an antisense oligonucleotide. In certain embodiments, the second oligomeric compound is a sense compound. In certain embodiments, the second modified oligonucleotide is a sense oligonucleotide.

[0280] In certain embodiments, an oligomeric duplex comprises a first oligomeric compound comprising a first modified oligonucleotide consisting of 15 to 30 linked nucleosides and a second oligomeric compound comprising a second modified oligonucleotide consisting of 15 to 29 linked nucleosides, wherein the nucleobase sequence of the first modified oligonucleotide and the nucleobase sequence of the second modified oligonucleotide each comprises at least 8, at least 9, at least 10, at least 11, at least 12, at least 13, at least 14, at least 15, at least 16, at least 17, at least 18, at least 19, at least 20, at least 21, at least 22, or at least 23 contiguous nucleobases of any of the following pairs of nucleobase sequences recited in SEQ ID NOs: 723/1029, 724/1030, 725/1031, 561/1032, 562/1033, 563/1034, 726/1035, 727/1036, 728/1037, 564/1038, 729/1039, 730/1040, 731/1041, 732/1042, 733/1043, 565/1044, 734/1045, 566/1046, 735/1047, 567/1048, 736/1049, 737/1050, 738/1051, 568/1052, 739/1053, 740/1054, 741/1055, 742/1056, 743/1057, 569/1058, 744/1059, 745/1060, 746/1061, 747/1062, 748/1063, 570/1064, 749/1065, 571/1066, 750/1067, 751/1068, 572/1069, 573/1070, 574/1071, 575/1072, 576/1073, 577/1074, 578/1075, 752/1076, 753/1077, 579/1078, 580/1079, 754/1080, 581/1081, 582/1082, 755/1083, 756/1084, 583/1085, 584/1086, 757/1087, 758/1088, 585/1089, 586/1090, 587/1091, 588/1092, 589/1093, 590/1094, 591/1095, 592/1096, 759/1097, 593/1098, 594/1099, 760/1100, 595/1101, 596/1102, 761/1103, 597/1104, 598/1105, 762/1106, 763/1107, 599/1108, 764/1109, 765/1110, 766/1111, 600/1112, 767/1113, 768/1114, 769/1115, 770/1116, 601/1117, 771/1118, 602/1119, 772/1120, 773/1121, 774/1122, 603/1123, 604/1124, 775/1125, 605/1126, 606/1127, 776/1128, 777/1129, 778/1130, 779/1131, 780/1132, 781/1133, 782/1134, 783/1135, 784/1136, 607/1137, 785/1138, 786/1139, 787/1140, 788/1141, 608/1142, 609/1143, 610/1144, 789/1145, 611/1146, 790/1147, 612/1148, 613/1149, 791/1150, 614/1151, 792/1152, 615/1153, 793/1154, 616/1155, 794/1156, 795/1157, 617/1158, 796/1159, 797/1160, 798/1161, 618/1162, 799/1163, 619/1164, 800/1165, 801/1166, 620/1167, 621/1168, 802/1169, 803/1170, 804/1171, 805/1172, 622/1173, 806/1174, 807/1175, 808/1176, 809/1177, 623/1178, 810/1179, 811/1180, 624/1181, 812/1182, 625/1183, 813/1184, 626/1185, 814/1186, 815/1187, 627/1188, 816/1189, 817/1190, 818/1191, 628/1192, 819/1193, 629/1194, 820/1195, 630/1196, 821/1197, 631/1198, 632/1199, 822/1200, 823/1201, 824/1202, 825/1203, 633/1204, 634/1205, 826/1206, 827/1207, 635/1208, 636/1209, 828/1210, 637/1211, 638/1212, 829/1213, 830/1214, 831/1215, 832/1216, 833/1217, 834/1218, 639/1219, 640/1220, 835/1221, 641/1222, 836/1223, 642/1224, 837/1225, 838/1226, 839/1227, 840/1228, 841/1229, 842/1230, 643/1231, 644/1232, 843/1233, 645/1234, 646/1235, 844/1236, 845/1237, 846/1238, 647/1239, 847/1240, 848/1241, 849/1242, 850/1243, 851/1244, 852/1245, 648/1246, 853/1247, 854/1248, 855/1249, 856/1250, 857/1251, 858/1252, 859/1253, 649/1254, 650/1255, 651/1256, 860/1257, 861/1258, 862/1259, 863/1260, 864/1261, 652/1262, 653/1263, 865/1264, 866/1265, 867/1266, 868/1267, 654/1268, 869/1269, 655/1270, 870/1271, 871/1272, 656/1273, 872/1274, 657/1275, 873/1276, 658/1277, 659/1278, 874/1279, 875/1280, 660/1281, 876/1282, 877/1283, 878/1284, 879/1285, 880/1286, 661/1287, 662/1288, 663/1289, 881/1290, 882/1291, 883/1292, 884/1293, 885/1294, 664/1295, 886/1296, 887/1297, 888/1298, 665/1299, 666/1300, 667/1301, 889/1302, 668/1303, 890/1304, 891/1305, 892/1306, 669/1307, 893/1308, 670/1309, 671/1310, 894/1311, 672/1312, 673/1313, 895/1314, 896/1315, 674/1316, 897/1317, 675/1318, 676/1319, 677/1320, 898/1321, 899/1322, 900/1323, 901/1324, 678/1325, 902/1326, 679/1327, 903/1328, 904/1329, 905/1330, 906/1331, 907/1332, 908/1333, 680/1334, 909/1335, 910/1336, 911/1337, 912/1338, 913/1339, 681/1340, 914/1341, 915/1342, 916/1343, 917/1344, 918/1345, 919/1346, 920/1347, 921/1348, 922/1349, 923/1350, 924/1351, 925/1352, 926/1353, 927/1354, 682/1355, 928/1356, 929/1357, 930/1358, 683/1359, 684/1360, 931/1361, 932/1362, 933/1363, 934/1364, 935/1365, 685/1366, 936/1367, 937/1368, 938/1369, 939/1370, 940/1371, 941/1372, 942/1373, 943/1374, 944/1375, 945/1376, 946/1377, 947/1378, 948/1379, 949/1380, 950/1381, 951/1382, 686/1383, 687/1384, 688/1385, 689/1386, 952/1387, 690/1388, 953/1389, 691/1390, 954/1391, 692/1392, 693/1393, 694/1394, 695/1395, 955/1396, 956/1397, 957/1398, 958/1399, 696/1400, 959/1401, 697/1402, 960/1403, 698/1404, 699/1405, 961/1406, 962/1407, 963/1408, 964/1409, 965/1410, 966/1411, 967/1412, 700/1413, 701/1414, 968/1415, 702/1416, 969/1417, 970/1418, 971/1419, 972/1420, 973/1421, 703/1422, 704/1423, 974/1424, 975/1425, 705/1426, 976/1427, 977/1428, 978/1429, 979/1430, 980/1431, 981/1432, 982/1433, 983/1434, 984/1435, 985/1436, 706/1437, 986/1438, 987/1439, 707/1440, 988/1441, 989/1442, 708/1443, 709/1444, 990/1445, 991/1446, 992/1447, 993/1448, 710/1449, 994/1450, 995/1451, 996/1452, 711/1453, 997/1454, 998/1455, 999/1456, 1000/1457, 712/1458, 1001/1459, 1002/1460, 713/1461, 1003/1462, 1004/1463, 1005/1464, 1006/1465, 1007/1466, 1008/1467, 1009/1468, 714/1469, 715/1470, 716/1471, 1010/1472, 717/1473, 718/1474, 1011/1475, 1012/1476, 719/1477, 720/1478, 1013/1479, 1014/1480, 1015/1481, 1016/1482, 1017/1483, 1018/1484, 1019/1485, 1020/1486, 1021/1487, 1022/1488, 721/1489, 1023/1490, 722/1491, 1024/1492, 1025/1493, 1026/1494, 1027/1495, or 1028/1496, wherein the nucleobase sequence of the first modified oligonucleotide comprises the nucleobase sequence of the first SEQ ID NO recited in the pair and the nucleobase sequence of the second modified oligonucleotide comprises the nucleobase sequence of the second SEQ ID NO recited in the pair.

[0281] In certain embodiments, an oligomeric duplex comprises a first oligomeric compound comprising a first modified oligonucleotide consisting of 15 to 30 linked nucleosides and a second oligomeric compound comprising a second modified oligonucleotide consisting of 15 to 29 linked nucleosides, wherein the nucleobase sequence of the first modified oligonucleotide and the nucleobase sequence of the second modified oligonucleotide comprise any of the following pairs of nucleobase sequences recited in SEQ ID NOs: 723/1029, 724/1030, 725/1031, 561/1032, 562/1033, 563/1034, 726/1035, 727/1036, 728/1037, 564/1038, 729/1039, 730/1040, 731/1041, 732/1042, 733/1043, 565/1044, 734/1045, 566/1046, 735/1047, 567/1048, 736/1049, 737/1050, 738/1051, 568/1052, 739/1053, 740/1054, 741/1055, 742/1056, 743/1057, 569/1058, 744/1059, 745/1060, 746/1061, 747/1062, 748/1063, 570/1064, 749/1065, 571/1066, 750/1067, 751/1068, 572/1069, 573/1070, 574/1071, 575/1072, 576/1073, 577/1074, 578/1075, 752/1076, 753/1077, 579/1078, 580/1079, 754/1080, 581/1081, 582/1082, 755/1083, 756/1084, 583/1085, 584/1086, 757/1087, 758/1088, 585/1089, 586/1090, 587/1091, 588/1092, 589/1093, 590/1094, 591/1095, 592/1096, 759/1097, 593/1098, 594/1099, 760/1100, 595/1101, 596/1102, 761/1103, 597/1104, 598/1105, 762/1106, 763/1107, 599/1108, 764/1109, 765/1110, 766/1111, 600/1112, 767/1113, 768/1114, 769/1115, 770/1116, 601/1117, 771/1118, 602/1119, 772/1120, 773/1121, 774/1122, 603/1123, 604/1124, 775/1125, 605/1126, 606/1127, 776/1128, 777/1129, 778/1130, 779/1131, 780/1132, 781/1133, 782/1134, 783/1135, 784/1136, 607/1137, 785/1138, 786/1139, 787/1140, 788/1141, 608/1142, 609/1143, 610/1144, 789/1145, 611/1146, 790/1147, 612/1148, 613/1149, 791/1150, 614/1151, 792/1152, 615/1153, 793/1154, 616/1155, 794/1156, 795/1157, 617/1158, 796/1159, 797/1160, 798/1161, 618/1162, 799/1163, 619/1164, 800/1165, 801/1166, 620/1167, 621/1168, 802/1169, 803/1170, 804/1171, 805/1172, 622/1173, 806/1174, 807/1175, 808/1176, 809/1177, 623/1178, 810/1179, 811/1180, 624/1181, 812/1182, 625/1183, 813/1184, 626/1185, 814/1186, 815/1187, 627/1188, 816/1189, 817/1190, 818/1191, 628/1192, 819/1193, 629/1194, 820/1195, 630/1196, 821/1197, 631/1198, 632/1199, 822/1200, 823/1201, 824/1202, 825/1203, 633/1204, 634/1205, 826/1206, 827/1207, 635/1208, 636/1209, 828/1210, 637/1211, 638/1212, 829/1213, 830/1214, 831/1215, 832/1216, 833/1217, 834/1218, 639/1219, 640/1220, 835/1221, 641/1222, 836/1223, 642/1224, 837/1225, 838/1226, 839/1227, 840/1228, 841/1229, 842/1230, 643/1231, 644/1232, 843/1233, 645/1234, 646/1235, 844/1236, 845/1237, 846/1238, 647/1239, 847/1240, 848/1241, 849/1242, 850/1243, 851/1244, 852/1245, 648/1246, 853/1247, 854/1248, 855/1249, 856/1250, 857/1251, 858/1252, 859/1253, 649/1254, 650/1255, 651/1256, 860/1257, 861/1258, 862/1259, 863/1260, 864/1261, 652/1262, 653/1263, 865/1264, 866/1265, 867/1266, 868/1267, 654/1268, 869/1269, 655/1270, 870/1271, 871/1272, 656/1273, 872/1274, 657/1275, 873/1276, 658/1277, 659/1278, 874/1279, 875/1280, 660/1281, 876/1282, 877/1283, 878/1284, 879/1285, 880/1286, 661/1287, 662/1288, 663/1289, 881/1290, 882/1291, 883/1292, 884/1293, 885/1294, 664/1295, 886/1296, 887/1297, 888/1298, 665/1299, 666/1300, 667/1301, 889/1302, 668/1303, 890/1304, 891/1305, 892/1306, 669/1307, 893/1308, 670/1309, 671/1310, 894/1311, 672/1312, 673/1313, 895/1314, 896/1315, 674/1316, 897/1317, 675/1318, 676/1319, 677/1320, 898/1321, 899/1322, 900/1323, 901/1324, 678/1325, 902/1326, 679/1327, 903/1328, 904/1329, 905/1330, 906/1331, 907/1332, 908/1333, 680/1334, 909/1335, 910/1336, 911/1337, 912/1338, 913/1339, 681/1340, 914/1341, 915/1342, 916/1343, 917/1344, 918/1345, 919/1346, 920/1347, 921/1348, 922/1349, 923/1350, 924/1351, 925/1352, 926/1353, 927/1354, 682/1355, 928/1356, 929/1357, 930/1358, 683/1359, 684/1360, 931/1361, 932/1362, 933/1363, 934/1364, 935/1365, 685/1366, 936/1367, 937/1368, 938/1369, 939/1370, 940/1371, 941/1372, 942/1373, 943/1374, 944/1375, 945/1376, 946/1377, 947/1378, 948/1379, 949/1380, 950/1381, 951/1382, 686/1383, 687/1384, 688/1385, 689/1386, 952/1387, 690/1388, 953/1389, 691/1390, 954/1391, 692/1392, 693/1393, 694/1394, 695/1395, 955/1396, 956/1397, 957/1398, 958/1399, 696/1400, 959/1401, 697/1402, 960/1403, 698/1404, 699/1405, 961/1406, 962/1407, 963/1408, 964/1409, 965/1410, 966/1411, 967/1412, 700/1413, 701/1414, 968/1415, 702/1416, 969/1417, 970/1418, 971/1419, 972/1420, 973/1421, 703/1422, 704/1423, 974/1424, 975/1425, 705/1426, 976/1427, 977/1428, 978/1429, 979/1430, 980/1431, 981/1432, 982/1433, 983/1434, 984/1435, 985/1436, 706/1437, 986/1438, 987/1439, 707/1440, 988/1441, 989/1442, 708/1443, 709/1444, 990/1445, 991/1446, 992/1447, 993/1448, 710/1449, 994/1450, 995/1451, 996/1452, 711/1453, 997/1454, 998/1455, 999/1456, 1000/1457, 712/1458, 1001/1459, 1002/1460, 713/1461, 1003/1462, 1004/1463, 1005/1464, 1006/1465, 1007/1466, 1008/1467, 1009/1468, 714/1469, 715/1470, 716/1471, 1010/1472, 717/1473, 718/1474, 1011/1475, 1012/1476, 719/1477, 720/1478, 1013/1479, 1014/1480, 1015/1481, 1016/1482, 1017/1483, 1018/1484, 1019/1485, 1020/1486, 1021/1487, 1022/1488, 721/1489, 1023/1490, 722/1491, 1024/1492, 1025/1493, 1026/1494, 1027/1495, or 1028/1496, wherein the nucleobase sequence of the first modified oligonucleotide comprises the nucleobase sequence of the first SEQ ID NO recited in the pair and the nucleobase sequence of the second modified oligonucleotide comprises the nucleobase sequence of the second SEQ ID NO recited in the pair.

[0282] In certain embodiments, an oligomeric duplex comprises a first oligomeric compound comprising a first modified oligonucleotide consisting of 23 linked nucleosides and a second oligomeric compound comprising a second modified oligonucleotide consisting of 21 linked nucleosides, wherein the nucleobase sequence of the first modified oligonucleotide and the nucleobase sequence of the second modified oligonucleotide consist of any of the following pairs of nucleobase sequences recited in SEQ ID NOs: 723/1029, 724/1030, 725/1031, 561/1032, 562/1033, 563/1034, 726/1035, 727/1036, 728/1037, 564/1038, 729/1039, 730/1040, 731/1041, 732/1042, 733/1043, 565/1044, 734/1045, 566/1046, 735/1047, 567/1048, 736/1049, 737/1050, 738/1051, 568/1052, 739/1053, 740/1054, 741/1055, 742/1056, 743/1057, 569/1058, 744/1059, 745/1060, 746/1061, 747/1062, 748/1063, 570/1064, 749/1065, 571/1066, 750/1067, 751/1068, 572/1069, 573/1070, 574/1071, 575/1072, 576/1073, 577/1074, 578/1075, 752/1076, 753/1077, 579/1078, 580/1079, 754/1080, 581/1081, 582/1082, 755/1083, 756/1084, 583/1085, 584/1086, 757/1087, 758/1088, 585/1089, 586/1090, 587/1091, 588/1092, 589/1093, 590/1094, 591/1095, 592/1096, 759/1097, 593/1098, 594/1099, 760/1100, 595/1101, 596/1102, 761/1103, 597/1104, 598/1105, 762/1106, 763/1107, 599/1108, 764/1109, 765/1110, 766/1111, 600/1112, 767/1113, 768/1114, 769/1115, 770/1116, 601/1117, 771/1118, 602/1119, 772/1120, 773/1121, 774/1122, 603/1123, 604/1124, 775/1125, 605/1126, 606/1127, 776/1128, 777/1129, 778/1130, 779/1131, 780/1132, 781/1133, 782/1134, 783/1135, 784/1136, 607/1137, 785/1138, 786/1139, 787/1140, 788/1141, 608/1142, 609/1143, 610/1144, 789/1145, 611/1146, 790/1147, 612/1148, 613/1149, 791/1150, 614/1151, 792/1152, 615/1153, 793/1154, 616/1155, 794/1156, 795/1157, 617/1158, 796/1159, 797/1160, 798/1161, 618/1162, 799/1163, 619/1164, 800/1165, 801/1166, 620/1167, 621/1168, 802/1169, 803/1170, 804/1171, 805/1172, 622/1173, 806/1174, 807/1175, 808/1176, 809/1177, 623/1178, 810/1179, 811/1180, 624/1181, 812/1182, 625/1183, 813/1184, 626/1185, 814/1186, 815/1187, 627/1188, 816/1189, 817/1190, 818/1191, 628/1192, 819/1193, 629/1194, 820/1195, 630/1196, 821/1197, 631/1198, 632/1199, 822/1200, 823/1201, 824/1202, 825/1203, 633/1204, 634/1205, 826/1206, 827/1207, 635/1208, 636/1209, 828/1210, 637/1211, 638/1212, 829/1213, 830/1214, 831/1215, 832/1216, 833/1217, 834/1218, 639/1219, 640/1220, 835/1221, 641/1222, 836/1223, 642/1224, 837/1225, 838/1226, 839/1227, 840/1228, 841/1229, 842/1230, 643/1231, 644/1232, 843/1233, 645/1234, 646/1235, 844/1236, 845/1237, 846/1238, 647/1239, 847/1240, 848/1241, 849/1242, 850/1243, 851/1244, 852/1245, 648/1246, 853/1247, 854/1248, 855/1249, 856/1250, 857/1251, 858/1252, 859/1253, 649/1254, 650/1255, 651/1256, 860/1257, 861/1258, 862/1259, 863/1260, 864/1261, 652/1262, 653/1263, 865/1264, 866/1265, 867/1266, 868/1267, 654/1268, 869/1269, 655/1270, 870/1271, 871/1272, 656/1273, 872/1274, 657/1275, 873/1276, 658/1277, 659/1278, 874/1279, 875/1280, 660/1281, 876/1282, 877/1283, 878/1284, 879/1285, 880/1286, 661/1287, 662/1288, 663/1289, 881/1290, 882/1291, 883/1292, 884/1293, 885/1294, 664/1295, 886/1296, 887/1297, 888/1298, 665/1299, 666/1300, 667/1301, 889/1302, 668/1303, 890/1304, 891/1305, 892/1306, 669/1307, 893/1308, 670/1309, 671/1310, 894/1311, 672/1312, 673/1313, 895/1314, 896/1315, 674/1316, 897/1317, 675/1318, 676/1319, 677/1320, 898/1321, 899/1322, 900/1323, 901/1324, 678/1325, 902/1326, 679/1327, 903/1328, 904/1329, 905/1330, 906/1331, 907/1332, 908/1333, 680/1334, 909/1335, 910/1336, 911/1337, 912/1338, 913/1339, 681/1340, 914/1341, 915/1342, 916/1343, 917/1344, 918/1345, 919/1346, 920/1347, 921/1348, 922/1349, 923/1350, 924/1351, 925/1352, 926/1353, 927/1354, 682/1355, 928/1356, 929/1357, 930/1358, 683/1359, 684/1360, 931/1361, 932/1362, 933/1363, 934/1364, 935/1365, 685/1366, 936/1367, 937/1368, 938/1369, 939/1370, 940/1371, 941/1372, 942/1373, 943/1374, 944/1375, 945/1376, 946/1377, 947/1378, 948/1379, 949/1380, 950/1381, 951/1382, 686/1383, 687/1384, 688/1385, 689/1386, 952/1387, 690/1388, 953/1389, 691/1390, 954/1391, 692/1392, 693/1393, 694/1394, 695/1395, 955/1396, 956/1397, 957/1398, 958/1399, 696/1400, 959/1401, 697/1402, 960/1403, 698/1404, 699/1405, 961/1406, 962/1407, 963/1408, 964/1409, 965/1410, 966/1411, 967/1412, 700/1413, 701/1414, 968/1415, 702/1416, 969/1417, 970/1418, 971/1419, 972/1420, 973/1421, 703/1422, 704/1423, 974/1424, 975/1425, 705/1426, 976/1427, 977/1428, 978/1429, 979/1430, 980/1431, 981/1432, 982/1433, 983/1434, 984/1435, 985/1436, 706/1437, 986/1438, 987/1439, 707/1440, 988/1441, 989/1442, 708/1443, 709/1444, 990/1445, 991/1446, 992/1447, 993/1448, 710/1449, 994/1450, 995/1451, 996/1452, 711/1453, 997/1454, 998/1455, 999/1456, 1000/1457, 712/1458, 1001/1459, 1002/1460, 713/1461, 1003/1462, 1004/1463, 1005/1464, 1006/1465, 1007/1466, 1008/1467, 1009/1468, 714/1469, 715/1470, 716/1471, 1010/1472, 717/1473, 718/1474, 1011/1475, 1012/1476, 719/1477, 720/1478, 1013/1479, 1014/1480, 1015/1481, 1016/1482, 1017/1483, 1018/1484, 1019/1485, 1020/1486, 1021/1487, 1022/1488, 721/1489, 1023/1490, 722/1491, 1024/1492, 1025/1493, 1026/1494, 1027/1495, or 1028/1496, wherein the nucleobase sequence of the first modified oligonucleotide comprises the nucleobase sequence of the first SEQ ID NO recited in the pair and the nucleobase sequence of the second modified oligonucleotide comprises the nucleobase sequence of the second SEQ ID NO recited in the pair.

[0283] In any of the oligomeric duplexes described herein, at least one nucleoside of the first modified oligonucleotide and/or the second modified oligonucleotide can comprise a modified sugar moiety. Examples of suitable modified sugar moieties include, but are not limited to, a bicyclic sugar moiety, such as a 2′-4′ bridge selected from —O—CH₂—; and —O—CH(CH₃)—, and a non-bicyclic sugar moiety, such as a 2′-MOE sugar moiety, a 2′-F sugar moiety, a 2′-OMe sugar moiety, or a 2′-NMA sugar moiety. In certain embodiments, at least 80%, at least 90%, or 100% of the nucleosides of the first modified oligonucleotide and/or the second modified oligonucleotide comprises a modified sugar moiety selected from 2′-F and 2′-OMe.

[0284] In any of the oligomeric duplexes described herein, at least one nucleoside of the first modified oligonucleotide and/or the second modified oligonucleotide can comprise a sugar surrogate. Examples of suitable sugar surrogates include, but are not limited to, morpholino, peptide nucleic acid (PNA), glycol nucleic acid (GNA), and unlocked nucleic acid (UNA). In certain embodiments, at least one nucleoside of the first modified oligonucleotide comprises a sugar surrogate, which can be a GNA.

[0285] In any of the oligomeric duplexes described herein, at least one internucleoside linkage of the first modified oligonucleotide and/or the second modified oligonucleotide can comprise a modified internucleoside linkage. In certain embodiments, the modified internucleoside linkage is a phosphorothioate internucleoside linkage. In certain embodiments, at least one of the first, second, or third internucleoside linkages from the 5′ end and/or the 3′ end of the first modified oligonucleotide comprises a phosphorothioate linkage. In certain embodiments, at least one of the first, second, or third internucleoside linkages from the 5′ end and/or the 3′ end of the second modified oligonucleotide comprises a phosphorothioate linkage.

[0286] In any of the oligomeric duplexes described herein, at least one internucleoside linkage of the first modified oligonucleotide and/or the second modified oligonucleotide can comprise a phosphodiester internucleoside linkage.

[0287] In any of the oligomeric duplexes described herein, each internucleoside linkage of the first modified oligonucleotide and/or the second modified oligonucleotide can be independently selected from a phosphodiester or a phosphorothioate internucleoside linkage.

[0288] In any of the oligomeric duplexes described herein, the internucleoside linkage motif of the second modified oligonucleotide can be ssooooooooooooooooss, wherein wherein each “o” represents a phosphodiester internucleoside linkage and each “s” represents a phosphorothioate internucleoside linkage.

[0289] In any of the oligomeric duplexes described herein, at least one nucleobase of the first modified oligonucleotide and/or the second modified oligonucleotide can be modified nucleobase. In certain embodiments, the modified nucleobase is 5-methylcytosine.

[0290] In any of the oligomeric duplexes described herein, the first modified oligonucleotide can comprise a stabilized phosphate group attached to the 5′ position of the 5′-most nucleoside. In certain embodiments, the stabilized phosphate group comprises a cyclopropyl phosphonate or an (E)-vinyl phosphonate.

[0291] In any of the oligomeric duplexes described herein, the first modified oligonucleotide can comprise a conjugate group. In certain embodiments, the conjugate group comprises a conjugate linker and a conjugate moiety. In certain embodiments, the conjugate group is attached to the first modified oligonucleotide at the 5′-end of the first modified oligonucleotide. In certain embodiments, the conjugate group is attached to the first modified oligonucleotide at the 3′-end of the modified oligonucleotide. In certain embodiments, the conjugate group comprises N-acetyl galactosamine. In certain embodiments, the conjugate group comprises a cell-targeting moiety having an affinity for transferrin receptor (TfR), also known as TfR1 and CD71. In certain embodiments, the conjugate group comprises an anti-TfR1 antibody or fragment thereof. In certain embodiments, the conjugate group comprises a protein or peptide capable of binding TfR1. In certain embodiments, the conjugate group comprises an aptamer capable of binding TfR1. In certain embodiments, conjugate groups may be selected from any of a C22 alkyl, C20 alkyl, C16 alkyl, C10 alkyl, C21 alkyl, C19 alkyl, C18 alkyl, C15 alkyl, C14 alkyl, C13 alkyl, C12 alkyl, C11 alkyl, C9 alkyl, C8 alkyl, C7 alkyl, C6 alkyl, C5 alkyl, C22 alkenyl, C20 alkenyl, C16 alkenyl, C10 alkenyl,

[0292] C21 alkenyl, C19 alkenyl, C18 alkenyl, C15 alkenyl, C14 alkenyl, C13 alkenyl, C12 alkenyl, C11 alkenyl, C9 alkenyl, C8 alkenyl, C7 alkenyl, C6 alkenyl, or C5 alkenyl. In certain embodiments, conjugate groups may be selected from any of C22 alkyl, C20 alkyl, C16 alkyl, C10 alkyl, C21 alkyl, C19 alkyl, C18 alkyl, C15 alkyl, C14 alkyl, C13 alkyl, C12 alkyl, C11 alkyl, C9 alkyl, C8 alkyl, C7 alkyl, C6 alkyl, and C5 alkyl, where the alkyl chain has one or more unsaturated bonds.

[0293] In any of the oligomeric duplexes described herein, the second modified oligonucleotide can comprise a conjugate group. In certain embodiments, the conjugate group comprises a conjugate linker and a conjugate moiety. In certain embodiments, the conjugate group is attached to the second modified oligonucleotide at the 5′-end of the second modified oligonucleotide. In certain embodiments, the conjugate group is attached to the second modified oligonucleotide at the 3′-end of the modified oligonucleotide. In certain embodiments, the conjugate group comprises N-acetyl galactosamine. In certain embodiments, the conjugate group comprises a cell-targeting moiety having an affinity for transferrin receptor (TfR), also known as TfR1 and CD71. In certain embodiments, the conjugate group comprises an anti-TfR1 antibody or fragment thereof. In certain embodiments, the conjugate group comprises a protein or peptide capable of binding TfR1. In certain embodiments, the conjugate group comprises an aptamer capable of binding TfR1. In certain embodiments, conjugate groups may be selected from any of a C22 alkyl, C20 alkyl, C16 alkyl, C10 alkyl, C21 alkyl, C19 alkyl, C18 alkyl, C15 alkyl, C14 alkyl, C13 alkyl, C12 alkyl, C11 alkyl, C9 alkyl, C8 alkyl, C7 alkyl, C6 alkyl, C5 alkyl, C22 alkenyl, C20 alkenyl, C16 alkenyl, C10 alkenyl, C21 alkenyl, C19 alkenyl, C18 alkenyl, C15 alkenyl, C14 alkenyl, C13 alkenyl, C12 alkenyl, C11 alkenyl, C9 alkenyl, C8 alkenyl, C7 alkenyl, C6 alkenyl, or C5 alkenyl. In certain embodiments, conjugate groups may be selected from any of C22 alkyl, C20 alkyl, C16 alkyl, C10 alkyl, C21 alkyl, C19 alkyl, C18 alkyl, C15 alkyl, C14 alkyl, C13 alkyl, C12 alkyl, C11 alkyl, C9 alkyl, C8 alkyl, C7 alkyl, C6 alkyl, and C5 alkyl, where the alkyl chain has one or more unsaturated bonds.

[0294] In certain embodiments, an antisense agent comprises an antisense compound, which comprises an oligomeric compound or an oligomeric duplex described herein. In certain embodiments, an antisense agent, which can comprise an oligomeric compound or an oligomeric duplex described herein, is an RNAi agent capable of reducing the amount of PCDH19 nucleic acid through the activation of RISC/Ago2. In certain embodiments, an antisense agent, which can comprise an oligomeric compound or an oligomeric duplex described herein, is an RNAse H agent capable of reducing the amount of PCDH19 nucleic acid through the activation of RNAse H. Certain embodiments provide an oligomeric agent comprising two or more oligomeric duplexes. In certain embodiments, an oligomeric agent comprises two or more of any of the oligomeric duplexes described herein. In certain embodiments, an oligomeric agent comprises two or more of the same oligomeric duplex, which can be any of the oligomeric duplexes described herein. In certain embodiments, the two or more oligomeric duplexes are linked together. In certain embodiments, the two or more oligomeric duplexes are covalently linked together. In certain embodiments, the second modified oligonucleotides of two or more oligomeric duplexes are covalently linked together. In certain embodiments, the second modified oligonucleotides of two or more oligomeric duplexes are covalently linked together at their 3′ ends. In certain embodiments, the two or more oligomeric duplexes are covalently linked together by a glycol linker, such as a tetraethylene glycol linker.

### I. Certain Oligonucleotides

[0295] In certain embodiments, provided herein are oligomeric compounds comprising oligonucleotides, which consist of linked nucleosides. Oligonucleotides may be unmodified oligonucleotides (RNA or DNA) or may be modified oligonucleotides. Modified oligonucleotides comprise at least one modification relative to unmodified RNA or DNA. That is, modified oligonucleotides comprise at least one modified nucleoside (comprising a modified sugar moiety and/or a modified nucleobase) and/or at least one modified internucleoside linkage. Certain modified nucleosides and modified internucleoside linkages suitable for use in modified oligonucleotides are described below.

### A. Certain Modified Nucleosides

[0296] Modified nucleosides comprise a modified sugar moiety or a modified nucleobase or both a modified sugar moiety and a modified nucleobase. In certain embodiments, modified nucleosides comprising the following modified sugar moieties and/or the following modified nucleobases may be incorporated into modified oligonucleotides.

### 1. Certain Sugar Moieties

[0297] In certain embodiments, modified sugar moieties are non-bicyclic modified sugar moieties. In certain embodiments, modified sugar moieties are bicyclic or tricyclic sugar moieties. In certain embodiments, modified sugar moieties are sugar surrogates. Such sugar surrogates may comprise one or more substitutions corresponding to those of other types of modified sugar moieties.

In certain embodiments, modified sugar moieties are non-bicyclic modified sugar moieties comprising a furanosyl ring with one or more substituent groups none of which bridges two atoms of the furanosyl ring to form a bicyclic structure. Such non bridging substituents may be at any position of the furanosyl, including but not limited to substituents at the 2′, 3′, 4′, and/or 5′ positions. In certain embodiments one or more non-bridging substituent of non-bicyclic modified sugar moieties is branched. Examples of 2′-substituent groups suitable for non-bicyclic modified sugar moieties include but are not limited to: 2′-F, 2′—OCH₃ (“OMe” or “O-methyl”), and 2′-O(CH₂)₂OCH₃ (“MOE” or “O-methoxyethyl”). In certain embodiments, 2′-substituent groups are selected from among: halo, allyl, amino, azido, SH, CN, OCN, CF₃, OCF₃, O—C₁-C₁₀ alkoxy, O—C₁-C₁₀ substituted alkoxy, O—C₁-C₁₀ alkyl, O—C₁-C₁₀ substituted alkyl, S-alkyl, N(Rₘ)-alkyl, O-alkenyl, S-alkenyl, N(Rₘ)-alkenyl, O-alkynyl, S-alkynyl, N(Rₘ)-alkynyl, O-alkylenyl-O-alkyl, alkynyl, alkaryl, aralkyl, O-alkaryl, O-aralkyl, O(CH₂)₂SCH₃, O(CH₂)₂ON(Rₘ) (Rₙ) or OCH₂C(═O)—N(Rₘ) (Rₙ), where each Rₘ and Rₙ is, independently, H, an amino protecting group, or substituted or unsubstituted C₁-C₁₀ alkyl, —O(CH₂)₂ON(CH₃)₂ (“DMAOE”), O(CH₂)₂O(CH₂)₂N(CH₃)₂ (“DMAEOE”), and the 2′-substituent groups described in Cook et al., U.S. Pat. No. 6,531,584; Cook et al., U.S. Pat. No. 5,859,221; and Cook et al., U.S. Pat. No. 6,005,087. Certain embodiments of these 2′-substituent groups can be further substituted with one or more substituent groups independently selected from among: hydroxyl, amino, alkoxy, carboxy, benzyl, phenyl, nitro (NO₂), thiol, thioalkoxy, thioalkyl, halogen, alkyl, aryl, alkenyl and alkynyl. In certain embodiments, non-bicyclic modified sugar moieties comprise a substituent group at the 3′-position. Examples of substituent groups suitable for the 3′-position of modified sugar moieties include but are not limited to alkoxy (e.g., methoxy), alkyl (e.g., methyl, ethyl). In certain embodiments, non-bicyclic modified sugar moieties comprise a substituent group at the 4′-position. Examples of 4′-substituent groups suitable for non-bicyclic modified sugar moieties include but are not limited to alkoxy (e.g., methoxy), alkyl, and those described in Manoharan et al., WO 2015/106128. Examples of 5′-substituent groups suitable for non-bicyclic modified sugar moieties include but are not limited to: 5′-methyl (R or S), 5′-vinyl, ethyl, and 5′-methoxy. In certain embodiments, non-bicyclic modified sugar moieties comprise more than one non-bridging sugar substituent, for example, 2′-F-5′-methyl sugar moieties and the modified sugar moieties and modified nucleosides described in Migawa et al., WO 2008/101157 and Rajeev et al., US2013/0203836.

[0298] In certain embodiments, a 2′-substituted non-bicyclic modified nucleoside comprises a sugar moiety comprising a non-bridging 2′-substituent group selected from: F, NH₂, N₃, OCF₃, OCH₃, O(CH₂)₃NH₂, CH₂CH═CH₂, OCH₂CH═CH₂, OCH₂CH₂OCH₃, O(CH₂)₂SCH₃, O(CH₂)₂ON(Rₘ)(Rₙ), O(CH₂)₂O(CH₂)₂N(CH₃)₂, and N-substituted acetamide (OCH₂C(═O)—N(Rₘ)(Rₙ)), where each Rₘ and Rₙ is, independently, H, an amino protecting group, or substituted or unsubstituted C₁-C₁₀ alkyl.

[0299] In certain embodiments, a 2′-substituted nucleoside non-bicyclic modified nucleoside comprises a sugar moiety comprising a non-bridging 2′-substituent group selected from: F, OCF₃, OCH₃, OCH₂CH₂OCH₃, O(CH₂)₂SCH₃, O(CH₂)₂ON(CH₃)₂, O(CH₂)₂O(CH₂)₂N(CH₃)₂, O(CH₂)₂ON(CH₃)₂(“DMAOE”), O(CH₂)₂O(CH₂)₂N(CH₃)₂ (“DMAEOE”) and OCH₂C(═O)—N(H)CH₃ (“NMA”).

[0300] In certain embodiments, a 2′-substituted non-bicyclic modified nucleoside comprises a sugar moiety comprising a non-bridging 2′-substituent group selected from: F, OCH₃, and OCH₂CH₂OCH₃.

[0301] In certain embodiments, modified furanosyl sugar moieties and nucleosides incorporating such modified furanosyl sugar moieties are further defined by isomeric configuration. For example, a 2′-deoxyfuranosyl sugar moiety may be in seven isomeric configurations other than the naturally occurring β-D-deoxyribosyl configuration. Such modified sugar moieties are described in, e.g., WO 2019/157531, incorporated by reference herein. A 2′-modified sugar moiety has an additional stereocenter at the 2′-position relative to a 2′-deoxyfuranosyl sugar moiety; therefore, such sugar moieties have a total of sixteen possible isomeric configurations. 2′-modified sugar moieties described herein are in the β-D-ribosyl isomeric configuration unless otherwise specified.

[0302] In naturally occurring nucleic acids, sugars are linked to one another 3′ to 5′. In certain embodiments, oligonucleotides include one or more nucleoside or sugar moiety linked at an alternative position, for example at the 2′ or inverted 5′ to 3′. For example, where the linkage is at the 2′ position, the 2′-substituent groups may instead be at the 3′-position.

[0303] Certain modified sugar moieties comprise a substituent that bridges two atoms of the furanosyl ring to form a second ring, resulting in a bicyclic sugar moiety. Nucleosides comprising such bicyclic sugar moieties have been referred to as bicyclic nucleosides (BNAs), locked nucleosides, or conformationally restricted nucleotides (CRN). Certain such compounds are described in US Patent Publication No. 2013/0190383; and PCT publication WO 2013/036868. In certain such embodiments, the bicyclic sugar moiety comprises a bridge between the 4′ and the 2′ furanose ring atoms. n certain such embodiments, the furanose ring is a ribose ring. Examples of such 4′ to 2′ bridging sugar substituents include but are not limited to: 4′-CH₂-2′, 4′-(CH₂)₂-2′, 4′-(CH₂)₃-2′, 4′-CH₂—O-2′ (“LNA”), 4′-CH₂—S-2′, 4′-(CH₂)₂—O-2′ (“ENA”), 4′-CH(CH₃)—O-2′ (referred to as “constrained ethyl” or “cEt” when in the S configuration), 4′-CH₂—O—CH₂-2′, 4′-CH₂—N(R)-2′, 4′-CH(CH₂OCH₃)—O-2′ (“constrained MOE” or “cMOE”) and analogs thereof (see, e.g., Seth et al., U.S. Pat. No. 7,399,845, Bhat et al., U.S. Pat. No. 7,569,686, Swayze et al., U.S. Pat. No. 7,741,457, and Swayze et al., U.S. Pat. No. 8,022,193), 4′-C(CH₃) (CH₃)—O-2′ and analogs thereof (see, e.g., Seth et al., U.S. Pat. No. 8,278,283), 4′-CH₂—N(OCH₃)-2′ and analogs thereof (see, e.g., Prakash et al., U.S. Pat. No. 8,278,425), 4′-CH₂—O—N(CH₃)-2′ (see, e.g., Allerson et al., U.S. Pat. No. 7,696,345 and Allerson et al., U.S. Pat. No. 8,124,745), 4′-CH₂—C(H)(CH₃)-2′ (see, e.g., Zhou, et al., J. Org. Chem., 2009, 74, 118-134), 4′-CH₂—C(═CH₂)-2′ and analogs thereof (see e.g., Seth et al., U.S. Pat. No. 8,278,426), 4′-C(RₐR_{b})—N(R)—O-2′, 4′-C(RₐR_{b})—O—N(R)-2′, 4′-CH₂—O—N(R)-2′, and 4′-CH₂—N(R)—O-2′, wherein each R, Rₐ, and R_{b} is, independently, H, a protecting group, or C₁-C₁₂ alkyl (see, e.g. Imanishi et al., U.S. Pat. No. 7,427,672).

[0304] In certain embodiments, such 4′ to 2′ bridges independently comprise from 1 to 4 linked groups independently selected from: —[C(Rₐ)(R_{b})]ₙ—, —[C(Rₐ)(R_{b})]ₙ—O—, C(Rₐ)═C(R_{b})—, C(Rₐ)═N—, C(═NRₐ)—, —C(═O)—, —C(═S)—, —O—, —Si(Rₐ)₂—, —S(═O)ₓ—, and N(Rₐ)—;
[0305] wherein:
[0306] x is 0, 1, or 2;
[0307] n is 1, 2, 3, or 4;
[0308] each Ra and Rb is, independently, H, a protecting group, hydroxyl, C1-C12 alkyl, substituted C1-C12 alkyl, C2-C12 alkenyl, substituted C2-C12 alkenyl, C2-C12 alkynyl, substituted C2-C12 alkynyl, C5-C20 aryl, substituted C5-C20 aryl, heterocycle radical, substituted heterocycle radical, heteroaryl, substituted heteroaryl, C5-C7 alicyclic radical, substituted C5-C7 alicyclic radical, halogen, OJ1, NJIJ2, SJ1, N3, COOJI, acyl (C(═O)—H), substituted acyl, CN, sulfonyl (S(═O) 2-J1), or sulfoxyl (S(═O)-J1); and each J1 and J2 is, independently, H, C1-C12 alkyl, substituted C1-C12 alkyl, C2-C12 alkenyl, substituted C2-C12 alkenyl, C2-C12 alkynyl, substituted C2-C12 alkynyl, C5-C20 aryl, substituted C5-C20 aryl, acyl (C(═O)—H), substituted acyl, a heterocycle radical, a substituted heterocycle radical, C1-C12 aminoalkyl, substituted C1-C12 aminoalkyl, or a protecting group.

[0309] Additional bicyclic sugar moieties are known in the art, see, for example: Freier et al., Nucleic Acids Research, 1997, 25 (22), 4429-4443, Albaek et al., J. Org. Chem., 2006, 71, 7731-7740, Singh et al., Chem. Commun., 1998, 4, 455-456; Koshkin et al., Tetrahedron, 1998, 54, 3607-3630; Wahlestedt et al., Proc. Natl. Acad. Sci. U.S.A, 2000, 97, 5633-5638; Kumar et al., Bioorg. Med. Chem. Lett., 1998, 8, 2219-2222; Singh et al., J. Org. Chem., 1998, 63, 10035-10039; Srivastava et al., J. Am. Chem. Soc., 2007, 129, 8362-8379; Elayadi et al., Curr. Opinion Invens. Drugs, 2001, 2, 558-561; Braasch et al., Chem. Biol., 2001, 8, 1-7; Orum et al., Curr. Opinion Mol. Ther., 2001, 3, 239-243; Wengel et al., U.S. Pat. No. 7,053,207, Imanishi et al., U.S. Pat. No. 6,268,490, Imanishi et al. U.S. Pat. No. 6,770,748, Imanishi et al., U.S. RE44,779; Wengel et al., U.S. Pat. No. 6,794,499, Wengel et al., U.S. Pat. No. 6,670,461; Wengel et al., U.S. Pat. No. 7,034,133, Wengel et al., U.S. Pat. No. 8,080,644; Wengel et al., U.S. Pat. No. 8,034,909; Wengel et al., U.S. Pat. No. 8,153,365; Wengel et al., U.S. Pat. No. 7,572,582; and Ramasamy et al., U.S. Pat. No. 6,525,191, Torsten et al., WO 2004/106356, Wengel et al., WO 1999/014226; Seth et al., WO 2007/134181; Seth et al., U.S. Pat. No. 7,547,684; Seth et al., U.S. Pat. No. 7,666,854; Seth et al., U.S. Pat. No. 8,088,746; Seth et al., U.S. Pat. No. 7,750,131; Seth et al., U.S. Pat. No. 8,030,467; Seth et al., U.S. Pat. No. 8,268,980; Seth et al., U.S. Pat. No. 8,546,556; Seth et al., U.S. Pat. No. 8,530,640; Migawa et al., U.S. Pat. No. 9,012,421; Seth et al., U.S. Pat. No. 8,501,805; Allerson et al., US2008/0039618; and Migawa et al., US2015/0191727. In certain embodiments, bicyclic sugar moieties and nucleosides incorporating such bicyclic sugar moieties are further defined by isomeric configuration. For example, an LNA nucleoside (described herein) may be in the α-L configuration or in the β-D configuration.

[chemical structure]

[0310] α-L-methyleneoxy (4′-CH₂—O-2′) or α-L-LNA bicyclic nucleosides have been incorporated into oligonucleotides that showed antisense activity (Frieden et al., Nucleic Acids Research, 2003, 21, 6365-6372). The addition of locked nucleic acids to siRNAs has been shown to increase siRNA stability in serum, and to reduce off-target effects (Elmen, J. et al., (2005) Nucleic Acids Research 33 (1): 439-447; Mook, OR. et al., (2007) Mal Cane Ther 6 (3): 833-843; Grunweller, A. et al., (2003) Nucleic Acids Research 31 (12): 3185-3193). Herein, general descriptions of bicyclic nucleosides include both isomeric configurations. When the positions of specific bicyclic nucleosides (e.g., LNA or cEt) are identified in exemplified embodiments herein, they are in the β-D configuration, unless otherwise specified.

[0311] In certain embodiments, modified sugar moieties comprise one or more non-bridging sugar substituent and one or more bridging sugar substituent (e.g., 5′-substituted and 4′-2′ bridged sugars).

[0312] In certain embodiments, modified sugar moieties are sugar surrogates. In certain such embodiments, the oxygen atom of the sugar moiety is replaced, e.g., with a sulfur, carbon or nitrogen atom. In certain such embodiments, such modified sugar moieties also comprise bridging and/or non-bridging substituents as described herein. For example, certain sugar surrogates comprise a 4′-sulfur atom and a substitution at the 2′-position (see, e.g., Bhat et al., U.S. Pat. No. 7,875,733 and Bhat et al., U.S. Pat. No. 7,939,677) and/or the 5′ position.

[0313] In certain embodiments, sugar surrogates comprise rings having other than 5 atoms. For example, in certain embodiments, a sugar surrogate comprises a six-membered tetrahydropyran (“THP”). Such tetrahydropyrans may be further modified or substituted. Nucleosides comprising such modified tetrahydropyrans include but are not limited to hexitol nucleic acid (“HNA”), anitol nucleic acid (“ANA”), manitol nucleic acid (“MNA”) (see, e.g., Leumann, CJ. Bioorg. & Med. Chem. 2002, 10, 841-854), fluoro HNA:

[chemical structure]

(“F-HNA”, see e.g. Swayze et al., U.S. Pat. No. 8,088,904; Swayze et al., U.S. Pat. No. 8,440,803; Swayze et al., U.S. Pat. No. 8,796,437; and Swayze et al., U.S. Pat. No. 9,005,906; F-HNA can also be referred to as a F-THP or 3′-fluoro tetrahydropyran), and nucleosides comprising additional modified THP compounds having the formula:

[chemical structure]

[0314] wherein, independently, for each of said modified THP nucleoside:
[0315] Bx is a nucleobase moiety;
[0316] T₃ and T₄ are each, independently, an internucleoside linking group linking the modified THP nucleoside to the remainder of an oligonucleotide or one of T₃ and T₄ is an internucleoside linking group linking the modified THP nucleoside to the remainder of an oligonucleotide and the other of T₃ and T₄ is H, a hydroxyl protecting group, a linked conjugate group, or a 5′ or 3′-terminal group;
[0317] q₁, q₂, q₃, q₄, q₅, q₆ and q₇ are each, independently, H, C₁-C₆ alkyl, substituted C₁-C₆ alkyl, C₂-C₆ alkenyl, substituted C₂-C₆ alkenyl, C₂-C₆ alkynyl, or substituted C₂-C₆ alkynyl; and each of R₁ and R₂ is independently selected from among: hydrogen, halogen, substituted or unsubstituted alkoxy, NJ₁J₂, SJ₁, N₃, OC(═X)J₁, OC(═X)NJ₁J₂, NJ₃C(═X) NJ₁J₂, and CN, wherein X is O, S or NJ₁, and each J₁, J₂, and J₃ is, independently, H or C₁-C₆ alkyl.

[0318] In certain embodiments, modified THP nucleosides are provided wherein q₁, q₂, q₃, q₄, q₅, q₆ and q₇ are each H. In certain embodiments, at least one of q₁, q₂, q₃, q₄, Q₅, q₆ and q₇ is other than H. In certain embodiments, at least one of q₁, q₂, q₃, q₄, q₅, q₆ and q₇ is methyl. In certain embodiments, modified THP nucleosides are provided wherein one of R₁ and R₂ is F. In certain embodiments, R₁ is F and R₂ is H, in certain embodiments, R₁ is methoxy and R₂ is H, and in certain embodiments, R₁ is methoxyethoxy and R₂ is H.

[0319] In certain embodiments, sugar surrogates comprise rings having more than 5 atoms and more than one heteroatom. For example, nucleosides comprising morpholino sugar moieties and their use in oligonucleotides have been reported (see, e.g., Braasch et al., Biochemistry, 2002, 41, 4503-4510 and Summerton et al., U.S. Pat. No. 5,698,685; Summerton et al., U.S. Pat. No. 5,166,315; Summerton et al., U.S. Pat. No. 5,185,444; and Summerton et al., U.S. Pat. No. 5,034,506). As used here, the term “morpholino” means a sugar surrogate having the following structure:

[chemical structure]

In certain embodiments, morpholinos may be modified, for example by adding or altering various substituent groups from the above morpholino structure. Such sugar surrogates are referred to herein as “modified morpholinos.”

[0320] In certain embodiments, sugar surrogates comprise acyclic moieties. Examples of nucleosides and oligonucleotides comprising such acyclic sugar surrogates include but are not limited to: peptide nucleic acid (“PNA”), acyclic butyl nucleic acid (see, e.g., Kumar et al., Org. Biomol. Chem., 2013, 11, 5853-5865), and nucleosides and oligonucleotides described in Manoharan et al., WO2011/133876. In certain embodiments, sugar surrogates comprise acyclic moieties. Examples of nucleosides and oligonucleotides comprising such acyclic sugar surrogates include, but are not limited to: peptide nucleic acid (“PNA”), acyclic butyl nucleic acid (see, e.g., Kumar et al., Org. Biomol. Chem., 2013, 11, 5853-5865), and nucleosides and oligonucleotides described in Manoharan et al., US2013/130378. Representative U.S. patents that teach the preparation of PNA compounds include, but are not limited to, U.S. Pat. Nos. 5,539,082; 5,714,331; and 5,719,262. Additional PNA compounds suitable for use in the oligonucleotides of the invention are described in, for example, in Nielsen et al., Science, 1991, 254, 1497-1500.

[0321] In certain embodiments, sugar surrogates are the “unlocked” sugar structure of UNA (unlocked nucleic acid) nucleosides. UNA is an unlocked acyclic nucleic acid, wherein any of the bonds of the sugar has been removed, forming an unlocked sugar surrogate. Representative U.S. publications that teach the preparation of UNA include, but are not limited to, U.S. Pat. No. 8,314,227; and US Patent Publication Nos. 2013/0096289; 2013/0011922; and 2011/0313020, the entire contents of each of which are hereby incorporated herein by reference.

[0322] In certain embodiments, sugar surrogates are the glycerol as found in GNA (glycol nucleic acid) nucleosides as depicted below:

[chemical structure]

where Bx represents any nucleobase.

[0323] Many other bicyclic and tricyclic sugar and sugar surrogates are known in the art that can be used in modified nucleosides.

### 2. Certain Modified Nucleobases

[0324] In certain embodiments, modified oligonucleotides comprise one or more nucleosides comprising an unmodified nucleobase. In certain embodiments, modified oligonucleotides comprise one or more nucleosides comprising a modified nucleobase. In certain embodiments, modified oligonucleotides comprise one or more nucleosides that does not comprise a nucleobase, referred to as an abasic nucleoside. In certain embodiments, modified oligonucleotides comprise one or more inosine nucleosides (i.e., nucleosides comprising a hypoxanthine nucleobase).

[0325] In certain embodiments, modified nucleobases are selected from: 5-substituted pyrimidines, 6-azapyrimi-dines, alkyl or alkynyl substituted pyrimidines, alkyl substituted purines, and N-2, N-6 and O-6 substituted purines. In certain embodiments, modified nucleobases are selected from: 5-methylcytosine, 2-aminopropyladenine, 5-hydroxymethylcytosine, xanthine, hypoxanthine, 2-aminoadenine, 6-N-methylguanine, 6-N-methyladenine, 2-propyladenine, 2-thiouracil, 2-thiothymine and 2-thiocytosine, 5-propynyl (—C═C—CH₃) uracil, 5-propynylcytosine, 6-azouracil, 6-azocytosine, 6-azothymine, 5-ribosyluracil (pseudouracil), 4-thiouracil, 8-halo, 8-amino, 8-thiol, 8-thioalkyl, 8-hydroxyl, 8-aza and other 8-substituted purines, 5-halo, particularly 5-bromo, 5-trifluoromethyl, 5-halouracil, and 5-halocytosine, 7-methylguanine, 7-methyladenine, 2-F-adenine, 2-aminoadenine, 7-deazaguanine, 7-deazaadenine, 3-deazaguanine, 3-deazaadenine, 6-N-benzoyladenine, 2-N-isobutyrylguanine, 4-N-benzoylcytosine, 4-N-benzoyluracil, 5-methyl 4-N-benzoylcytosine, 5-methyl 4-N-benzoyluracil, universal bases, hydrophobic bases, promiscuous bases, size-expanded bases, and fluorinated bases. Further modified nucleobases include tricyclic pyrimidines, such as 1,3-diazaphenoxazine-2-one, 1,3-diazaphenothiazine-2-one and 9-(2-aminoethoxy)-1,3-diazaphenoxazine-2-one (G-clamp). Modified nucleobases may also include those in which the purine or pyrimidine base is replaced with other heterocycles, for example 7-deaza-adenine, 7-deazaguanosine, 2-aminopyridine and 2-pyridone. Further nucleobases include those disclosed in Merigan et al., U.S. Pat. No. 3,687,808, those disclosed in The Concise Encyclopedia Of Polymer Science And Engineering, Kroschwitz, J. I., Ed., John Wiley & Sons, 1990, 858-859; Englisch et al., Angewandte Chemie, International Edition, 1991, 30, 613; Sanghvi, Y. S., Chapter 15, Antisense Research and Applications, Crooke, S. T. and Lebleu, B., Eds., CRC Press, 1993, 273-288; and those disclosed in Chapters 6 and 15, Antisense Drug Technology, Crooke S.T., Ed., CRC Press, 2008, 163-166 and 442-443.

[0326] Publications that teach the preparation of certain of the above noted modified nucleobases as well as other modified nucleobases include without limitation, Manoharan et al., US2003/0158403; Manoharan et al., US2003/0175906; Dinh et al., U.S. Pat. No. 4,845,205; Spielvogel et al., U.S. Pat. No. 5,130,302; Rogers et al., U.S. Pat. No. 5,134,066; Bischofberger et al., U.S. Pat. No. 5,175,273; Urdea et al., U.S. Pat. No. 5,367,066; Benner et al., U.S. Pat. No. 5,432,272; Matteucci et al., U.S. Pat. No. 5,434,257; Gmeiner et al., U.S. Pat. No. 5,457,187; Cook et al., U.S. Pat. No. 5,459,255; Froehler et al., U.S. Pat. No. 5,484,908; Matteucci et al., U.S. Pat. No. 5,502,177; Hawkins et al., U.S. Pat. No. 5,525,711; Haralambidis et al., U.S. Pat. No. 5,552,540; Cook et al., U.S. Pat. No. 5,587,469; Froehler et al., U.S. Pat. No. 5,594,121; Switzer et al., U.S. Pat. No. 5,596,091; Cook et al., U.S. Pat. No. 5,614,617; Froehler et al., U.S. Pat. No. 5,645,985; Cook et al., U.S. Pat. No. 5,681,941; Cook et al., U.S. Pat. No. 5,811,534; Cook et al., U.S. Pat. No. 5,750,692; Cook et al., U.S. Pat. No. 5,948,903; Cook et al., U.S. Pat. No. 5,587,470; Cook et al., U.S. Pat. No. 5,457,191; Matteucci et al., U.S. Pat. No. 5,763,588; Froehler et al., U.S. Pat. No. 5,830,653; Cook et al., U.S. Pat. No. 5,808,027; Cook et al., U.S. Pat. No. 6,166,199; and Matteucci et al., U.S. Pat. No. 6,005,096.

### 3. Certain Modified Internucleoside Linkages

[0327] The naturally occurring internucleoside linkage of RNA and DNA is a 3′ to 5′ phosphodiester linkage. In certain embodiments, nucleosides of modified oligonucleotides may be linked together using one or more modified internucleoside linkages. The two main classes of internucleoside linking groups are defined by the presence or absence of a phosphorus atom. Representative phosphorus-containing internucleoside linkages include but are not limited to phosphates, which contain a phosphodiester bond (“P—O”) (also referred to as unmodified or naturally occurring linkages), phosphotriesters, methylphosphonates, phosphoramidates, and phosphorothioates (“P═S”), and phosphorodithioates (“HS—P═S”). Representative non-phosphorus containing internucleoside linking groups include but are not limited to methylenemethylimino (—CH₂—N(CH₃)—O—CH₂—), thiodiester, thionocarbamate (—O—C(═O)(NH)—S—); siloxane (—O—SiH₂—O—); and N,N′-dimethylhydrazine (—CH₂—N(CH₃)—N(CH₃)—). Modified internucleoside linkages, compared to naturally occurring phosphate linkages, can be used to alter, typically increase, nuclease resistance of the oligonucleotide. In certain embodiments, internucleoside linkages having a chiral atom can be prepared as a racemic mixture, or as separate enantiomers. Methods of preparation of phosphorous-containing and non-phosphorous-containing internucleoside linkages are well known to those skilled in the art.

[0328] Representative internucleoside linkages having a chiral center include but are not limited to alkylphosphonates and phosphorothioates. Modified oligonucleotides comprising internucleoside linkages having a chiral center can be prepared as populations of modified oligonucleotides comprising stereorandom internucleoside linkages, or as populations of modified oligonucleotides comprising phosphorothioate linkages in particular stereochemical configurations. In certain embodiments, populations of modified oligonucleotides comprise phosphorothioate internucleoside linkages wherein all of the phosphorothioate internucleoside linkages are stereorandom. Such modified oligonucleotides can be generated using synthetic methods that result in random selection of the stereochemical configuration of each phosphorothioate linkage. Nonetheless, each individual phosphorothioate of each individual oligonucleotide molecule has a defined stereoconfiguration. In certain embodiments, populations of modified oligonucleotides are enriched for modified oligonucleotides comprising one or more particular phosphorothioate internucleoside linkages in a particular, independently selected stereochemical configuration. In certain embodiments, the particular configuration of the particular phosphorothioate linkage is present in at least 65% of the molecules in the population. In certain embodiments, the particular configuration of the particular phosphorothioate linkage is present in at least 70% of the molecules in the population. In certain embodiments, the particular configuration of the particular phosphorothioate linkage is present in at least 80% of the molecules in the population. In certain embodiments, the particular configuration of the particular phosphorothioate linkage is present in at least 90% of the molecules in the population. In certain embodiments, the particular configuration of the particular phosphorothioate linkage is present in at least 99% of the molecules in the population. Such chirally enriched populations of modified oligonucleotides can be generated using synthetic methods known in the art, e.g., methods described in Oka et al., JACS 125, 8307 (2003), Wan et al. Nuc. Acid. Res. 42, 13456 (2014), and WO 2017/015555. In certain embodiments, a population of modified oligonucleotides is enriched for modified oligonucleotides having at least one indicated phosphorothioate in the (Sp) configuration. In certain embodiments, a population of modified oligonucleotides is enriched for modified oligonucleotides having at least one phosphorothioate in the (Rp) configuration. In certain embodiments, modified oligonucleotides comprising (Rp) and/or (Sp) phosphorothioates comprise one or more of the following formulas, respectively, wherein “B” indicates a nucleobase:

[chemical structure]

[0329] In certain embodiments, a modified internucleoside linkage comprises a linking group having a formula:

[chemical structure]

wherein independently for each internucleoside linking group of the modified oligonucleotide:
[0330] X is selected from O or S;
[0331] R₁ is selected from H, C₁-C₆ alkyl, and substituted C₁-C₆ alkyl; and
[0332] T is selected from SO₂R₂, C(═O) R₃, and P(═O) R₄R₅, wherein:
   [0333] R₂ is selected from an aryl, a substituted aryl, a heterocycle, a substituted heterocycle, an aromatic heterocycle, a substituted aromatic heterocycle, a diazole, a substituted diazole, a C₁-C₆ alkoxy, C₁-C₆ alkyl, C₁-C₆ alkenyl, C₁-C₆ alkynyl, substituted C₁-C₆ alkyl, substituted C₁-C₆ alkenyl substituted C₁-C₆ alkynyl, and a conjugate group;
   [0334] R₃ is selected from an aryl, a substituted aryl, CH₃, N(CH₃) 2, OCH₃ and a conjugate group;
   [0335] R₄ is selected from OCH₃, OH, C₁-C₆ alkyl, substituted C₁-C₆ alkyl and a conjugate group; and
   [0336] R₅ is selected from OCH₃, OH, C₁-C₆ alkyl, and substituted C₁-C₆ alkyl.

[0337] In certain embodiments, a modified internucleoside linkage comprises a mesyl phosphoramidate linking group having a formula:

[chemical structure]

[0338] In certain embodiments, a mesyl phosphoramidate internucleoside linkage may comprise a chiral center. In certain embodiments, modified oligonucleotides comprising (Rp) and/or (Sp) mesyl phosphoramidates comprise one or more of the following formulas, respectively, wherein “B” indicates a nucleobase:

[chemical structure]

Unless otherwise indicated, chiral internucleoside linkages of modified oligonucleotides described herein can be stereorandom or in a particular stereochemical configuration.

[0339] Neutral internucleoside linkages include, without limitation, phosphotriesters, methylphosphonates, MMI (3′-CH₂—N(CH₃)—O-5′), amide-3 (3′-CH₂—C(═O)—N(H)—5′), amide-4 (3′-CH₂—N(H)—C(═O)—5′), formacetal (3′-O—CH₂—O-5′), methoxypropyl (MOP), and thioformacetal (3′-S—CH₂—O-5′). Further neutral internucleoside linkages include nonionic linkages comprising siloxane (dialkylsiloxane), carboxylate ester, carboxamide, sulfide, sulfonate ester and amides (See for example: Carbohydrate Modifications in Antisense Research; Y. S. Sanghvi and P. D. Cook, Eds., ACS Symposium Series 580; Chapters 3 and 4, 40-65). Further neutral internucleoside linkages include nonionic linkages comprising mixed N, O, S and CH₂ component parts.

[0340] In certain embodiments, modified oligonucleotides comprise one or more inverted nucleoside, as shown below:

[chemical structure]

wherein each Bx independently represents any nucleobase.

[0341] In certain embodiments, an inverted nucleoside is terminal (i.e., the last nucleoside on one end of an oligonucleotide) and so only one internucleoside linkage depicted above will be present. In certain such embodiments, additional features (such as a conjugate group) may be attached to the inverted nucleoside. Such terminal inverted nucleosides can be attached to either or both ends of an oligonucleotide.

[0342] In certain embodiments, such groups lack a nucleobase and are referred to herein as inverted sugar moieties. In certain embodiments, an inverted sugar moiety is terminal (i.e., attached to the last nucleoside on one end of an oligonucleotide) and so only one internucleoside linkage above will be present. In certain such embodiments, additional features (such as a conjugate group) may be attached to the inverted sugar moiety. Such terminal inverted sugar moieties can be attached to either or both ends of an oligonucleotide.

[0343] In certain embodiments, nucleic acids can be linked 2′ to 5′ rather than the standard 3′ to 5′ linkage. Such a linkage is illustrated below.

[chemical structure]

wherein each Bx represents any nucleobase.

### B. Certain Motifs

[0344] In certain embodiments, modified oligonucleotides comprise one or more modified nucleosides comprising a modified sugar moiety. In certain embodiments, modified oligonucleotides comprise one or more modified nucleosides comprising a modified nucleobase. In certain embodiments, modified oligonucleotides comprise one or more modified internucleoside linkage. In such embodiments, the modified, unmodified, and differently modified sugar moieties, nucleobases, and/or internucleoside linkages of a modified oligonucleotide define a pattern or motif. In certain embodiments, the patterns of sugar moieties, nucleobases, and internucleoside linkages are each independent of one another. Thus, a modified oligonucleotide may be described by its sugar motif, nucleobase motif and/or internucleoside linkage motif (as used herein, nucleobase motif describes the modifications to the nucleobases independent of the sequence of nucleobases).

### 1. Certain Sugar Motifs

[0345] In certain embodiments, oligonucleotides comprise one or more type of modified sugar and/or unmodified sugar moiety arranged along the oligonucleotide or region thereof in a defined pattern or sugar motif. In certain instances, such sugar motifs include but are not limited to any of the sugar modifications discussed herein. Gapmer Oligonucleotides

[0346] In certain embodiments, modified oligonucleotides comprise or consist of a region having a gapmer motif, which is defined by two external regions or “wings” and a central or internal region or “gap.” The three regions of a gapmer motif (the 5′-wing, the gap, and the 3′-wing) form a contiguous sequence of nucleosides wherein at least some of the sugar moieties of the nucleosides of each of the wings differ from at least some of the sugar moieties of the nucleosides of the gap. Specifically, at least the sugar moieties of the nucleosides of each wing that are closest to the gap (the 3′-most nucleoside of the 5′-wing and the 5′-most nucleoside of the 3′-wing) differ from the sugar moiety of the neighboring gap nucleosides, thus defining the boundary between the wings and the gap (i.e., the wing/gap junction). In certain embodiments, the sugar moieties within the gap are the same as one another. In certain embodiments, the gap includes one or more nucleoside having a sugar moiety that differs from the sugar moiety of one or more other nucleosides of the gap. In certain embodiments, the sugar motifs of the two wings are the same as one another (symmetric gapmer). In certain embodiments, the sugar motif of the 5′-wing differs from the sugar motif of the 3′-wing (asymmetric gapmer).

[0347] In certain embodiments, the wings of a gapmer comprise 1-6 nucleosides. In certain embodiments, each nucleoside of each wing of a gapmer comprises a modified sugar moiety. In certain embodiments, at least one nucleoside of each wing of a gapmer comprises a modified sugar moiety. In certain embodiments, at least two nucleosides of each wing of a gapmer comprises a modified sugar moiety. In certain embodiments, at least three nucleosides of each wing of a gapmer comprises a modified sugar moiety. In certain embodiments, at least four nucleosides of each wing of a gapmer comprises a modified sugar moiety.

[0348] In certain embodiments, the gap of a gapmer comprises 7-12 nucleosides. In certain embodiments, each nucleoside of the gap of a gapmer comprises a 2′-β-D-deoxyribosyl sugar moiety. In certain embodiments, at least one nucleoside of the gap of a gapmer comprises a modified sugar moiety.

[0349] In certain embodiments, the gapmer is a deoxy gapmer. In certain embodiments, the nucleosides on the gap side of each wing/gap junction comprise 2′-deoxyribosyl sugar moieties and the nucleosides on the wing sides of each wing/gap junction comprise modified sugar moieties. In certain embodiments, each nucleoside of the gap comprises a 2′-β-D-deoxyribosyl sugar moiety. In certain embodiments, each nucleoside of each wing of a gapmer comprises a modified sugar moiety. In certain embodiments, at least one nucleoside of the gap of a gapmer comprises a modified sugar moiety. In certain embodiments, one nucleoside of the gap comprises a modified sugar moiety and each remaining nucleoside of the gap comprises a 2′-deoxyribosyl sugar moiety. In certain embodiments, at least one nucleoside of the gap of a gapmer comprises a 2′-OMe sugar moiety.

[0350] Herein, the lengths (number of nucleosides) of the three regions of a gapmer may be provided using the notation [# of nucleosides in the 5′-wing]-[# of nucleosides in the gap]-[# of nucleosides in the 3′-wing]. Thus, a 3-10-3 gapmer consists of 3 linked nucleosides in each wing and 10 linked nucleosides in the gap. Where such nomenclature is followed by a specific modification, that modification is the modification in each sugar moiety of each wing and the gap nucleosides comprise 2′-β-D-deoxyribosyl sugar moieties. A 3-10-3 cEt gapmer consists of 3 linked cEt nucleosides in the 5′-wing, 10 linked 2′-β-D-deoxynucleosides in the gap, and 3 linked cEt nucleosides in the 3′-wing. A 5-10-5 MOE gapmer consists of 5 linked 2′-MOE nucleosides in the 5′-wing, 10 linked 2′-β-D-deoxynucleosides in the gap, and 5 linked 2′-MOE nucleosides in the 3′-wing.

[0351] In certain embodiments, modified oligonucleotides have the sugar motif from 5′ to 3′: eeeeeddddddddddeeeee; wherein each “d” represents a 2′-β-D-deoxyribosyl sugar moiety and each “e” represents a 2′-MOE ribosyl sugar moiety.

[0352] In certain embodiments, modified oligonucleotides have the sugar motif from 5′ to 3′: kkkddddddddddkkk; wherein each “d” represents a 2′-β-D-deoxyribosyl sugar moiety, and each “k” represents a cEt sugar moiety.

### 2. Certain Nucleobase Motifs

[0353] In certain embodiments, oligonucleotides comprise modified and/or unmodified nucleobases arranged along the oligonucleotide or region thereof in a defined pattern or motif. In certain embodiments, each nucleobase is modified. In certain embodiments, none of the nucleobases are modified. In certain embodiments, each purine or each pyrimidine is modified. In certain embodiments, each adenine is modified. In certain embodiments, each guanine is modified. In certain embodiments, each thymine is modified. In certain embodiments, each uracil is modified. In certain embodiments, each cytosine is modified. In certain embodiments, some or all of the cytosine nucleobases in a modified oligonucleotide are 5-methylcytosines. In certain embodiments, all of the cytosine nucleobases are 5-methylcytosines and all of the other nucleobases of the modified oligonucleotide are unmodified nucleobases.

[0354] In certain embodiments, modified oligonucleotides comprise a block of modified nucleobases. In certain such embodiments, the block is at the 3′-end of the oligonucleotide. In certain embodiments the block is within 3 nucleosides of the 3′-end of the oligonucleotide. In certain embodiments, the block is at the 5′-end of the oligonucleotide. In certain embodiments the block is within 3 nucleosides of the 5′-end of the oligonucleotide.

[0355] In certain embodiments, oligonucleotides having a gapmer motif comprise a nucleoside comprising a modified nucleobase. In certain such embodiments, one nucleoside comprising a modified nucleobase is in the central gap of an oligonucleotide having a gapmer motif. In certain such embodiments, the sugar moiety of said nucleoside is a 2′-deoxyribosyl sugar moiety. In certain embodiments, the modified nucleobase is selected from: a 2-thiopyrimidine and a 5-propynepyrimidine.

### 3. Certain Internucleoside Linkage Motifs

[0356] In certain embodiments, oligonucleotides comprise modified and/or unmodified internucleoside linkages arranged along the oligonucleotide or region thereof in a defined pattern or motif. In certain embodiments, each internucleoside linking group is a phosphodiester internucleoside linkage (P═O). In certain embodiments, each internucleoside linking group of a modified oligonucleotide is a phosphorothioate internucleoside linkage (P═S). In certain embodiments, each internucleoside linkage of a modified oligonucleotide is independently selected from a phosphorothioate internucleoside linkage and phosphodiester internucleoside linkage. In certain embodiments, each phosphorothioate internucleoside linkage is independently selected from a stereorandom phosphorothioate a (Sp) phosphorothioate, and a (Rp) phosphorothioate.

[0357] In certain embodiments, the sugar motif of a modified oligonucleotide is a gapmer and the internucleoside linkages within the gap are all modified. In certain such embodiments, some or all of the internucleoside linkages in the wings are unmodified phosphodiester internucleoside linkages. In certain embodiments, the terminal internucleoside linkages are modified. In certain embodiments, the sugar motif of a modified oligonucleotide is a gapmer, and the internucleoside linkage motif comprises at least one phosphodiester internucleoside linkage in at least one wing, wherein the at least one phosphodiester linkage is not a terminal internucleoside linkage, and the remaining internucleoside linkages are phosphorothioate internucleoside linkages. In certain such embodiments, all of the phosphorothioate linkages are stereorandom. In certain embodiments, all of the phosphorothioate linkages in the wings are (Sp) phosphorothioates, and the gap comprises at least one Sp, Sp, Rp motif. In certain embodiments, populations of modified oligonucleotides are enriched for modified oligonucleotides comprising such internucleoside linkage motifs.

### C. Certain Lengths

[0358] It is possible to increase or decrease the length of an oligonucleotide without eliminating activity. For example, in Woolf et al. (Proc. Natl. Acad. Sci. USA 89:7305-7309, 1992), a series of oligonucleotides 13-25 nucleobases in length were tested for their ability to induce cleavage of a target RNA in an oocyte injection model. Oligonucleotides 25 nucleobases in length with 8 or 11 mismatch bases near the ends of the oligonucleotides were able to direct specific cleavage of the target RNA, albeit to a lesser extent than the oligonucleotides that contained no mismatches. Similarly, target specific cleavage was achieved using 13 nucleobase oligonucleotides, including those with 1 or 3 mismatches.

[0359] In certain embodiments, oligonucleotides (including modified oligonucleotides) can have any of a variety of ranges of lengths. In certain embodiments, oligonucleotides consist of X to Y linked nucleosides, where X represents the fewest number of nucleosides in the range and Y represents the largest number nucleosides in the range. In certain such embodiments, X and Y are each independently selected from 8, 9, 10, 11, 12, 13, 14, 15, 16, 17, 18, 19, 20, 21, 22, 23, 24, 25, 26, 27, 28, 29, 30, 31, 32, 33, 34, 35, 36, 37, 38, 39, 40, 41, 42, 43, 44, 45, 46, 47, 48, 49, and 50; provided that X≤Y. For example, in certain embodiments, oligonucleotides consist of 12 to 13, 12 to 14, 12 to 15, 12 to 16, 12 to 17, 12 to 18, 12 to 19, 12 to 20, 12 to 21, 12 to 22, 12 to 23, 12 to 24, 12 to 25, 12 to 26, 12 to 27, 12 to 28, 12 to 29, 12 to 30, 13 to 14, 13 to 15, 13 to 16, 13 to 17, 13 to 18, 13 to 19, 13 to 20, 13 to 21, 13 to 22, 13 to 23, 13 to 24, 13 to 25, 13 to 26, 13 to 27, 13 to 28, 13 to 29, 13 to 30, 14 to 15, 14 to 16, 14 to 17, 14 to 18, 14 to 19, 14 to 20, 14 to 21, 14 to 22, 14 to 23, 14 to 24, 14 to 25, 14 to 26, 14 to 27, 14 to 28, 14 to 29, 14 to 30, 15 to 16, 15 to 17, 15 to 18, 15 to 19, 15 to 20, 15 to 21, 15 to 22, 15 to 23, 15 to 24, 15 to 25, 15 to 26, 15 to 27, 15 to 28, 15 to 29, 15 to 30, 16 to 17, 16 to 18, 16 to 19, 16 to 20, 16 to 21, 16 to 22, 16 to 23, 16 to 24, 16 to 25, 16 to 26, 16 to 27, 16 to 28, 16 to 29, 16 to 30, 17 to 18, 17 to 19, 17 to 20, 17 to 21, 17 to 22, 17 to 23, 17 to 24, 17 to 25, 17 to 26, 17 to 27, 17 to 28, 17 to 29, 17 to 30, 18 to 19, 18 to 20, 18 to 21, 18 to 22, 18 to 23, 18 to 24, 18 to 25, 18 to 26, 18 to 27, 18 to 28, 18 to 29, 18 to 30, 19 to 20, 19 to 21, 19 to 22, 19 to 23, 19 to 24, 19 to 25, 19 to 26, 19 to 27, 19 to 28, 19 to 29, 19 to 30, 20 to 21, 20 to 22, 20 to 23, 20 to 24, 20 to 25, 20 to 26, 20 to 27, 20 to 28, 20 to 29, 20 to 30, 21 to 22, 21 to 23, 21 to 24, 21 to 25, 21 to 26, 21 to 27, 21 to 28, 21 to 29, 21 to 30, 22 to 23, 22 to 24, 22 to 25, 22 to 26, 22 to 27, 22 to 28, 22 to 29, 22 to 30, 23 to 24, 23 to 25, 23 to 26, 23 to 27, 23 to 28, 23 to 29, 23 to 30, 24 to 25, 24 to 26, 24 to 27, 24 to 28, 24 to 29, 24 to 30, 25 to 26, 25 to 27, 25 to 28, 25 to 29, 25 to 30, 26 to 27, 26 to 28, 26 to 29, 26 to 30, 27 to 28, 27 to 29, 27 to 30, 28 to 29, 28 to 30, or 29 to 30 linked nucleosides.

### D. Certain Modified Oligonucleotides

[0360] In certain embodiments, the above modifications (sugar, nucleobase, internucleoside linkage) are incorporated into a modified oligonucleotide. In certain embodiments, modified oligonucleotides are characterized by their modification motifs and overall lengths. In certain embodiments, such parameters are each independent of one another. Thus, unless otherwise indicated, each internucleoside linkage of an oligonucleotide having a gapmer sugar motif may be modified or unmodified and may or may not follow the gapmer modification pattern of the sugar modifications. For example, the internucleoside linkages within the wing regions of a sugar gapmer may be the same or different from one another and may be the same or different from the internucleoside linkages of the gap region of the sugar motif. Likewise, such sugar gapmer oligonucleotides may comprise one or more modified nucleobase independent of the gapmer pattern of the sugar modifications. Unless otherwise indicated, all modifications are independent of nucleobase sequence.

### E. Certain Populations of Modified Oligonucleotides

[0361] Populations of modified oligonucleotides in which all of the modified oligonucleotides of the population have the same molecular formula can be stereorandom populations or chirally enriched populations. All of the chiral centers of all of the modified oligonucleotides are stereorandom in a stereorandom population. In a chirally enriched population, at least one particular chiral center is not stereorandom in the modified oligonucleotides of the population. In certain embodiments, the modified oligonucleotides of a chirally enriched population are enriched for β-D ribosyl sugar moieties, and all of the phosphorothioate internucleoside linkages are stereorandom. In certain embodiments, the modified oligonucleotides of a chirally enriched population are enriched for both β-D ribosyl sugar moieties and at least one, particular phosphorothioate internucleoside linkage in a particular stereochemical configuration.

### F. Nucleobase Sequence

[0362] In certain embodiments, oligonucleotides (unmodified or modified oligonucleotides) are further described by their nucleobase sequence. In certain embodiments oligonucleotides have a nucleobase sequence that is complementary to a second oligonucleotide or an identified reference nucleic acid, such as a target nucleic acid. In certain such embodiments, a region of an oligonucleotide has a nucleobase sequence that is complementary to a second oligonucleotide or an identified reference nucleic acid, such as a target nucleic acid. In certain embodiments, the nucleobase sequence of a region or entire length of an oligonucleotide is at least 50%, at least 60%, at least 70%, at least 80%, at least 85%, at least 90%, at least 95%, or 100% complementary to the second oligonucleotide or nucleic acid, such as a target nucleic acid.

### II. Certain Oligomeric Compounds

[0363] In certain embodiments, provided herein are oligomeric compounds, which consist of an oligonucleotide (modified or unmodified) and optionally one or more conjugate groups and/or terminal groups. Conjugate groups consist of one or more conjugate moiety and a conjugate linker which links the conjugate moiety to the oligonucleotide. Conjugate groups may be attached to either or both ends of an oligonucleotide and/or at any internal position. In certain embodiments, conjugate groups are attached to the 2′-position of a nucleoside of a modified oligonucleotide. In certain embodiments, conjugate groups that are attached to either or both ends of an oligonucleotide are terminal groups. In certain such embodiments, conjugate groups or terminal groups are attached at the 3′ and/or 5′-end of oligonucleotides. In certain such embodiments, conjugate groups (or terminal groups) are attached at the 3′-end of oligonucleotides. In certain embodiments, conjugate groups are attached near the 3′-end of oligonucleotides. In certain embodiments, conjugate groups (or terminal groups) are attached at the 5′-end of oligonucleotides. In certain embodiments, conjugate groups are attached near the 5′-end of oligonucleotides.

[0364] Examples of terminal groups include but are not limited to conjugate groups, capping groups, phosphate moieties, protecting groups, modified or unmodified nucleosides, and two or more nucleosides that are independently modified or unmodified.

### A. Certain Conjugate Groups

[0365] In certain embodiments, oligonucleotides are covalently attached to one or more conjugate groups. In certain embodiments, conjugate groups modify one or more properties of the attached oligonucleotide, including but not limited to pharmacodynamics, pharmacokinetics, stability, binding, absorption, tissue distribution, cellular distribution, cellular uptake, charge and clearance.

[0366] In certain embodiments, conjugation of one or more carbohydrate moieties to a modified oligonucleotide can optimize one or more properties of the modified oligonucleotide. In certain embodiments, the carbohydrate moiety is attached to a modified subunit of the modified oligonucleotide. For example, the ribose sugar of one or more ribonucleotide subunits of a modified oligonucleotide can be replaced with another moiety, e.g. a non-carbohydrate (preferably cyclic) carrier to which is attached a carbohydrate ligand. A ribonucleotide subunit in which the ribose sugar of the subunit has been so replaced is referred to herein as a ribose replacement modification subunit (RRMS), which is a modified sugar moiety. A cyclic carrier may be a carbocyclic ring system, i.e., one or more ring atoms may be a heteroatom, e.g., nitrogen, oxygen, sulphur. The cyclic carrier may be a monocyclic ring system, or may contain two or more rings, e.g. fused rings. The cyclic carrier may be a fully saturated ring system, or it may contain one or more double bonds. In certain embodiments, the modified oligonucleotide is a gapmer.

[0367] In certain embodiments, conjugate groups impart a new property on the attached oligonucleotide, e.g., fluorophores or reporter groups that enable detection of the oligonucleotide. Certain conjugate groups and conjugate moieties have been described previously, for example: cholesterol moiety (Letsinger et al., Proc. Natl. Acad. Sci. USA, 1989, 86, 6553-6556), cholic acid (Manoharan et al., Bioorg. Med. Chem. Lett., 1994, 4, 1053-1060), a thioether, e.g., hexyl-S-tritylthiol (Manoharan et al., Ann. N.Y. Acad. Sci., 1992, 660, 306-309; Manoharan et al., Bioorg. Med. Chem. Lett., 1993, 3, 2765-2770), a thiocholesterol (Oberhauser et al., Nucl. Acids Res., 1992, 20, 533-538), an aliphatic chain, e.g., do-decan-diol or undecyl residues (Saison-Behmoaras et al., EMBO J., 1991, 10, 1111-1118; Kabanov et al., FEBS Lett., 1990, 259, 327-330; Svinarchuk et al., Biochimie, 1993, 75, 49-54), a phospholipid, e.g., di-hexadecyl-rac-glycerol or triethyl-ammonium 1,2-di-O-hexadecyl-rac-glycero-3-H-phosphonate (Manoharan et al., Tetrahedron Lett., 1995, 36, 3651-3654; Shea et al., Nucl. Acids Res., 1990, 18, 3777-3783), a polyamine or a polyethylene glycol chain (Manoharan et al., Nucleosides & Nucleotides, 1995, 14, 969-973), or adamantane acetic acid a palmityl moiety (Mishra et al., Biochim. Biophys. Acta, 1995, 1264, 229-237), an octadecylamine or hexylamino-carbonyl-oxycholesterol moiety (Crooke et al., J. Pharmacol. Exp. Ther., 1996, 277, 923-937), a tocopherol group (Nishina et al., Molecular Therapy Nucleic Acids, 2015, 4, e220; and Nishina et al., Molecular Therapy, 2008, 16, 734-740), or a GalNAc cluster (e.g., WO2014/179620).

[0368] In certain embodiments, conjugate groups may be selected from any of a C22 alkyl, C20 alkyl, C16 alkyl, C10 alkyl, C21 alkyl, C19 alkyl, C18 alkyl, C15 alkyl, C14 alkyl, C13 alkyl, C12 alkyl, C11 alkyl, C9 alkyl, C8 alkyl, C7 alkyl, C6 alkyl, C5 alkyl, C22 alkenyl, C20 alkenyl, C16 alkenyl, C10 alkenyl, C21 alkenyl, C19 alkenyl, C18 alkenyl, C15 alkenyl, C14 alkenyl, C13 alkenyl, C12 alkenyl, C11 alkenyl, C9 alkenyl, C8 alkenyl, C7 alkenyl, C6 alkenyl, or C5 alkenyl.

[0369] In certain embodiments, conjugate groups may be selected from any of C22 alkyl, C20 alkyl, C16 alkyl, C10 alkyl, C21 alkyl, C19 alkyl, C18 alkyl, C15 alkyl, C14 alkyl, C13 alkyl, C12 alkyl, C11 alkyl, C9 alkyl, C8 alkyl, C7 alkyl, C6 alkyl, and C5 alkyl, where the alkyl chain has one or more unsaturated bonds.

[0370] In certain embodiments, a conjugate group has the following structure:

[chemical structure]

### 1. Conjugate Moieties

[0371] Conjugate moieties include, without limitation, intercalators, reporter molecules, polyamines, polyamides, peptides, carbohydrates (e.g., GalNAc), vitamin moieties, polyethylene glycols, thioethers, polyethers, cholesterols, thiocholesterols, cholic acid moieties, folate, lipids, phospholipids, biotin, phenazine, phenanthridine, anthraquinone, adamantane, acridine, fluoresceins, rhodamines, coumarins, fluorophores, and dyes.

[0372] In certain embodiments, a conjugate moiety comprises an active drug substance, for example, aspirin, warfarin, phenylbutazone, ibuprofen, suprofen, fen-bufen, ketoprofen, (S)—(+)-pranoprofen, carprofen, dansylsarcosine, 2,3,5-triiodobenzoic acid, fingolimod, flufenamic acid, folinic acid, a benzothiadiazide, chlorothiazide, a diazepine, indo-methicin, a barbiturate, a cephalosporin, a sulfa drug, an antidiabetic, an antibacterial or an antibiotic.

### 2. Conjugate Linkers

[0373] Conjugate moieties are attached to oligonucleotides through conjugate linkers. In certain oligomeric compounds, the conjugate linker is a single chemical bond (i.e., the conjugate moiety is attached directly to an oligonucleotide through a single bond). In certain embodiments, the conjugate linker comprises a chain structure, such as a hydrocarbyl chain, or an oligomer of repeating units such as ethylene glycol, nucleosides, or amino acid units.

[0374] In certain embodiments, a conjugate linker comprises pyrrolidine.

[0375] In certain embodiments, a conjugate linker comprises one or more groups selected from alkyl, amino, oxo, amide, disulfide, polyethylene glycol, ether, thioether, and hydroxylamino. In certain such embodiments, the conjugate linker comprises groups selected from alkyl, amino, oxo, amide and ether groups. In certain embodiments, the conjugate linker comprises groups selected from alkyl and amide groups. In certain embodiments, the conjugate linker comprises groups selected from alkyl and ether groups. In certain embodiments, the conjugate linker comprises at least one phosphorus moiety. In certain embodiments, the conjugate linker comprises at least one phosphate group. In certain embodiments, the conjugate linker includes at least one neutral linking group.

[0376] In certain embodiments, conjugate linkers, including the conjugate linkers described above, are bifunctional linking moieties, e.g., those known in the art to be useful for attaching conjugate groups to compounds, such as the oligonucleotides provided herein. In general, a bifunctional linking moiety comprises at least two functional groups. One of the functional groups is selected to bind to a particular site on a compound and the other is selected to bind to a conjugate group. Examples of functional groups used in a bifunctional linking moiety include but are not limited to electrophiles for reacting with nucleophilic groups and nucleophiles for reacting with electrophilic groups. In certain embodiments, bifunctional linking moieties comprise one or more groups selected from amino, hydroxyl, carboxylic acid, thiol, alkyl, alkenyl, and alkynyl.

[0377] Examples of conjugate linkers include but are not limited to pyrrolidine, 8-amino-3,6-dioxaoctanoic acid (ADO), succinimidyl 4-(N-maleimidomethyl) cyclohexane-1-carboxylate (SMCC) and 6-aminohexanoic acid (AHEX or AHA). Other conjugate linkers include but are not limited to substituted or unsubstituted C₁-C₁₀ alkyl, substituted or unsubstituted C₂-C₁₀ alkenyl or substituted or unsubstituted C₂-C₁₀ alkynyl, wherein a nonlimiting list of preferred substituent groups includes hydroxyl, amino, alkoxy, carboxy, benzyl, phenyl, nitro, thiol, thioalkoxy, halogen, alkyl, aryl, alkenyl and alkynyl.

[0378] In certain embodiments, conjugate linkers comprise 1-10 linker-nucleosides. In certain embodiments, conjugate linkers comprise 2-5 linker-nucleosides. In certain embodiments, conjugate linkers comprise exactly 3 linker-nucleosides. In certain embodiments, conjugate linkers comprise the TCA motif. In certain embodiments, such linker-nucleosides are modified nucleosides. In certain embodiments such linker-nucleosides comprise a modified sugar moiety. In certain embodiments, linker-nucleosides are unmodified. In certain embodiments, linker-nucleosides comprise an optionally protected heterocyclic base selected from a purine, substituted purine, pyrimidine or substituted pyrimidine. In certain embodiments, a cleavable moiety is a nucleoside selected from uracil, thymine, cytosine, 4-N-benzoylcytosine, 5-methylcytosine, 4-N-benzoyl-5-methylcytosine, adenine, 6-N-benzoyladenine, guanine and 2-N-isobutyrylguanine. It is typically desirable for linker-nucleosides to be cleaved from the oligomeric compound after it reaches a target tissue. Accordingly, linker-nucleosides are typically linked to one another and to the remainder of the oligomeric compound through cleavable bonds. In certain embodiments, such cleavable bonds are phosphodiester bonds.

[0379] Herein, linker-nucleosides are not considered to be part of the oligonucleotide. Accordingly, in embodiments in which an oligomeric compound comprises an oligonucleotide consisting of a specified number or range of linked nucleosides and/or a specified percent complementarity to a reference nucleic acid and the oligomeric compound also comprises a conjugate group comprising a conjugate linker comprising linker-nucleosides, those linker-nucleosides are not counted toward the length of the oligonucleotide and are not used in determining the percent complementarity of the oligonucleotide for the reference nucleic acid. For example, an oligomeric compound may comprise (1) a modified oligonucleotide consisting of 8-30 nucleosides and (2) a conjugate group comprising 1-10 linker-nucleosides that are contiguous with the nucleosides of the modified oligonucleotide. The total number of contiguous linked nucleosides in such an oligomeric compound is more than 30. Alternatively, an oligomeric compound may comprise a modified oligonucleotide consisting of 8-30 nucleosides and no conjugate group. The total number of contiguous linked nucleosides in such an oligomeric compound is no more than 30. Unless otherwise indicated conjugate linkers comprise no more than 10 linker-nucleosides. In certain embodiments, conjugate linkers comprise no more than 5 linker-nucleosides. In certain embodiments, conjugate linkers comprise no more than 3 linker-nucleosides. In certain embodiments, conjugate linkers comprise no more than 2 linker-nucleosides. In certain embodiments, conjugate linkers comprise no more than 1 linker-nucleoside.

[0380] In certain embodiments, it is desirable for a conjugate group to be cleaved from the oligonucleotide. For example, in certain circumstances oligomeric compounds comprising a particular conjugate moiety are better taken up by a particular cell type, but once the oligomeric compound has been taken up, it is desirable that the conjugate group be cleaved to release the unconjugated or parent oligonucleotide. Thus, certain conjugate linkers may comprise one or more cleavable moieties. In certain embodiments, a cleavable moiety is a cleavable bond. In certain embodiments, a cleavable moiety is a group of atoms comprising at least one cleavable bond. In certain embodiments, a cleavable moiety comprises a group of atoms having one, two, three, four, or more than four cleavable bonds. In certain embodiments, a cleavable moiety is selectively cleaved inside a cell or subcellular compartment, such as a lysosome. In certain embodiments, a cleavable moiety is selectively cleaved by endogenous enzymes, such as nucleases.

[0381] In certain embodiments, a cleavable bond is selected from among: an amide, an ester, an ether, one or both esters of a phosphodiester, a phosphate ester, a carbamate, or a disulfide. In certain embodiments, a cleavable bond is one or both of the esters of a phosphodiester. In certain embodiments, a cleavable moiety comprises a phosphate or phosphodiester. In certain embodiments, the cleavable moiety is a phosphate linkage between an oligonucleotide and a conjugate moiety or conjugate group.

[0382] In certain embodiments, a cleavable moiety comprises or consists of one or more linker-nucleosides. In certain such embodiments, the one or more linker-nucleosides are linked to one another and/or to the remainder of the oligomeric compound through cleavable bonds. In certain embodiments, such cleavable bonds are unmodified phosphodiester bonds. In certain embodiments, a cleavable moiety is 2′-deoxynucleoside that is attached to either the 3′ or 5′-terminal nucleoside of an oligonucleotide by a phosphate internucleoside linkage and covalently attached to the remainder of the conjugate linker or conjugate moiety by a phosphate or phosphorothioate linkage. In certain such embodiments, the cleavable moiety is 2′-deoxyadenosine.

### 3. Cell-Targeting Moieties

[0383] In certain embodiments, a conjugate group comprises a cell-targeting moiety. In certain embodiments, a conjugate group has the general formula:

[chemical structure]

[0384] wherein n is from 1 to about 3, m is 0 when n is 1, m is 1 when n is 2 or greater, j is 1 or 0, and k is 1 or 0.

[0385] In certain embodiments, n is 1, j is 1 and k is 0. In certain embodiments, n is 1, j is 0 and k is 1. In certain embodiments, n is 1, jis 1 and k is 1. In certain embodiments, n is 2, jis 1 and k is 0. In certain embodiments, n is 2, j is 0 and k is 1. In certain embodiments, n is 2, j is 1 and k is 1. In certain embodiments, n is 3, jis 1 and k is 0. In certain embodiments, n is 3, jis 0 and k is 1. In certain embodiments, n is 3, j is 1 and k is 1.

[0386] In certain embodiments, conjugate groups comprise cell-targeting moieties that have at least one tethered ligand. In certain embodiments, cell-targeting moieties comprise two tethered ligands covalently ligands covalently attached to a branching group.

[0387] In certain embodiments, each ligand of a cell-targeting moiety has an affinity for at least one type of receptor on a target cell. In certain embodiments, each ligand has an affinity for at least one type of receptor on the surface of a mammalian liver cell. In certain embodiments, each ligand has an affinity for the hepatic asialoglycoprotein receptor (ASGP-R). In certain embodiments, each ligand is a carbohydrate.

[0388] In certain embodiments, oligomeric compounds comprise a conjugate group comprising a cell-targeting moiety having an affinity for transferrin receptor (TfR), also known as TfR1 and CD71. In certain embodiments, the conjugate group comprises an anti-TfR1 antibody or fragment thereof. In certain embodiments, the anti-TfR 1 antibody or fragment thereof can be any known in the art including but not limited to those described in WO1991/004753; WO2013/103800; WO2014/144060; WO2016/081643; WO2016/179257; WO2016/207240; WO2017/221883; WO2018/129384; WO2018/124121; WO2019/151539; WO2020/132584; WO2020/028864; U.S. Pat. Nos. 7,208,174; 9,034,329; and 10,550,188. In certain embodiments, a fragment of an anti-TfR1 antibody is F(ab′) 2, Fab, Fab′, Fv, or scFv.

[0389] In certain embodiments, the conjugate group comprises a protein or peptide capable of binding TfR1. In certain embodiments, the protein or peptide capable of binding TfR1 can be any known in the art including but not limited to those described in WO2019/140050; WO2020/037150; WO2020/124032; and U.S. Pat. No. 10,138,483.

[0390] In certain embodiments, the conjugate group comprises an aptamer capable of binding TfR1. In certain embodiments, the aptamer capable of binding TfR1 can be any known in the art including but not limited to those described in WO2013/163303; WO2019/033051; and WO2020/245198.

### B. Certain Terminal Groups

[0391] In certain embodiments, oligomeric compounds comprise one or more terminal groups. In certain such embodiments, oligomeric compounds comprise a stabilized 5′-phosphate. Stabilized 5′-phosphates include, but are not limited to 5′-phosphonates, including, but not limited to 5′-vinylphosphonates. In certain embodiments, terminal groups comprise one or more abasic sugar moieties and/or inverted nucleosides. In certain embodiments, terminal groups comprise one or more 2′-linked nucleosides or sugar moieties. In certain such embodiments, the 2′-linked group is an abasic sugar moiety.

### III. Antisense Activity

[0392] In certain embodiments, oligomeric compounds and oligomeric duplexes are capable of hybridizing to a target nucleic acid, resulting in at least one antisense activity; such oligomeric compounds and oligomeric duplexes are antisense agents. In certain embodiments, antisense agents have antisense activity when they reduce or inhibit the amount or activity of a target nucleic acid by 25% or more in the standard cell assay. In certain embodiments, antisense agents selectively affect one or more target nucleic acid. Such antisense agents comprise a nucleobase sequence that hybridizes to one or more target nucleic acid, resulting in one or more desired antisense activity and does not hybridize to one or more non-target nucleic acid or does not hybridize to one or more non-target nucleic acid in such a way that results in significant undesired antisense activity.

[0393] In certain antisense activities, hybridization of an antisense agents or a portion or an antisense agentto a target nucleic acid results in recruitment of a protein that cleaves the target nucleic acid. For example, certain antisense agents result in RNase H mediated cleavage of the target nucleic acid. RNase H is a cellular endonuclease that cleaves the RNA strand of an RNA: DNA duplex. The DNA in such an RNA: DNA duplex need not be unmodified DNA. In certain embodiments, described herein are antisense agents comprising antisense oligomeric compounds comprising antisense oligonucleotidesthat are sufficiently “DNA-like” to elicit RNase H activity. In certain embodiments, one or more non-DNA-like nucleoside in the gap of a gapmer is tolerated.

[0394] In certain antisense activities, an antisense agent or a portion of an antisense agent is loaded into an RNA-induced silencing complex (RISC), ultimately resulting in cleavage of the target nucleic acid. For example, certain antisense agents result in cleavage of the target nucleic acid by Argonaute. Antisense agents that are loaded into RISC are RNAi agents. RNAi agents may be double-stranded (siRNA or dsRNAi) or single-stranded (ssRNAi).

[0395] In certain embodiments, hybridization of an antisense agent or portion thereof to a target nucleic acid does not result in recruitment of a protein that cleaves that target nucleic acid. In certain embodiments, hybridization of the antisense agent or portion thereof to the target nucleic acid results in alteration of splicing of the target nucleic acid. In certain embodiments, hybridization of an antisense agent or a portion thereof to a target nucleic acid results in inhibition of a binding interaction between the target nucleic acid and a protein or other nucleic acid. In certain embodiments, hybridization of an antisense agent or a portion thereof to a target nucleic acid results in alteration of translation of the target nucleic acid.

[0396] Antisense activities may be observed directly or indirectly. In certain embodiments, observation or detection of an antisense activity involves observation or detection of a change in an amount of a target nucleic acid or protein encoded by such target nucleic acid, a change in the ratio of splice variants of a nucleic acid or protein and/or a phenotypic change in a cell or animal.

### IV. Certain Target Nucleic Acids

[0397] In certain embodiments, oligomeric compounds comprise or consist of an oligonucleotide comprising a region that is complementary to a target nucleic acid. In certain embodiments, the target nucleic acid is an endogenous RNA molecule. In certain embodiments, the target nucleic acid encodes a protein. In certain such embodiments, the target nucleic acid is selected from: a mature mRNA and a pre-mRNA, including intronic, exonic and untranslated regions. In certain embodiments, the target RNA is a mature mRNA. In certain embodiments, the target nucleic acid is a pre-mRNA. In certain embodiments, the target region is entirely within an intron. In certain embodiments, the target region spans an intron/exon junction. In certain embodiments, the target region is at least 50% within an intron.

### A. Complementarity/Mismatches to the Target Nucleic Acid and Duplex Complementarity

[0398] In certain embodiments, oligonucleotides are complementary to the target nucleic acid over the entire length of the oligonucleotide. In certain embodiments, oligonucleotides are 99%, 95%, 90%, 85%, or 80% complementary to the target nucleic acid. In certain embodiments, oligonucleotides are at least 80% complementary to the target nucleic acid over the entire length of the oligonucleotide and comprise a region that is 100% or fully complementary to a target nucleic acid. In certain embodiments, the region of full complementarity is from 6 to 20, to 18, or 18 to 20 nucleobases in length.

[0399] It is possible to introduce mismatch bases without eliminating activity. For example, Gautschi et al (J. Natl. Cancer Inst. 93:463-471, March 2001) demonstrated the ability of an oligonucleotide having 100% complementarity to the bcl-2 mRNA and having 3 mismatches to the bcl-xL mRNA to reduce the expression of both bcl-2 and bcl-xL in vitro and in vivo. Furthermore, this oligonucleotide demonstrated potent anti-tumor activity in vivo. Maher and Dolnick (Nuc. Acid. Res. 16:3341-3358, 1988) tested a series of tandem 14 nucleobase oligonucleotides, and 28 and 42 nucleobase oligonucleotides comprised of the sequence of two or three of the tandem oligonucleotides, respectively, for their ability to arrest translation of human DHFR in a rabbit reticulocyte assay. Each of the three 14 nucleobase oligonucleotides alone was able to inhibit translation, albeit at a more modest level than the 28 or 42 nucleobase oligonucleotides.

[0400] In certain embodiments, oligonucleotides comprise one or more mismatched nucleobases relative to the target nucleic acid. In certain embodiments, antisense activity against the target is reduced by such mismatch, but activity against a non-target is reduced by a greater amount. Thus, in certain embodiments selectivity of the oligonucleotide is improved. In certain embodiments, the mismatch is specifically positioned within an oligonucleotide having a gapmer motif. In certain embodiments, the mismatch is at position 1, 2, 3, 4, 5, 6, 7, or 8 from the 5′-end of the gap region. In certain embodiments, the mismatch is at position 9, 8, 7, 6, 5, 4, 3, 2, 1 from the 3′-end of the gap region. In certain embodiments, the mismatch is at position 1, 2, 3, or 4 from the 5′-end of the wing region. In certain embodiments, the mismatch is at position 4, 3, 2, or 1 from the 3′-end of the wing region.

### B. PCDH19

[0401] In certain embodiments, oligomeric compounds comprise or consist of an oligonucleotide that is complementary to a target nucleic acid, wherein the target nucleic acid is a PCDH19 nucleic acid. In certain embodiments, the PCDH19 nucleic acid has the nucleobase sequence set forth in SEQ ID NO: 1 (ENSEMBL Accession No. ENSG00000165194.15 from version 104: May 2021), to SEQ ID NO: 2 (the cDNA of ENSEMBL Accession No. ENST00000373034.8 from version 104: May2021), or to both. In certain embodiments, contacting a cell with an oligomeric compound complementary to SEQ ID NO: 1 or SEQ ID NO: 2 reduces the amount of PCDH19 RNA, and in certain embodiments reduces the amount of PCDH19 protein. In certain embodiments, contacting a cell with an oligomeric compound complementary to SEQ ID NO: 1 or SEQ ID NO: 2 reduces the amount of PCDH19 RNA in a cell, and in certain embodiments reduces the amount of PCDH19 protein in a cell. In certain embodiments, the cell is in vitro. In certain embodiments, the oligomeric compound consists of a modified oligonucleotide. In certain embodiments, the oligomeric compound consists of a modified oligonucleotide and a conjugate group. In certain embodiments, the oligomeric compound is paired with an additional oligomeric compound in an oligomeric duplex. In certain embodiments, the oligomeric duplex comprises a conjugate group.

[0402] In certain embodiments, an oligomeric compound complementary to SEQ ID NO: 1 or SEQ ID NO: 2 is capable of reducing the detectable amount of PCDH19 RNA in vitro by at least 10%, at least 20%, at least 30%, at least 40%, at least 50%, at least 60%, at least 70%, at least 80%, or at least 90% in the standard cell assay. In certain embodiments, an oligomeric compound complementary to SEQ ID NO: 1 or SEQ ID NO: 2 is capable of reducing the detectable amount of PCDH19 protein in vitro by at least 10%, at least 20%, at least 30%, at least 40%, at least 50%, at least 60%, at least 70%, at least 80%, or at least 90%. In certain embodiments, an oligomeric compound complementary to SEQ ID NO: 1 or SEQ ID NO: 2 is capable of reducing the detectable amount of PCDH19 RNA in vivo by at least 10%, at least 20%, at least 30%, at least 40%, at least 50%, at least 60%, at least 70%, at least 80%, or at least 90%. In certain embodiments, an oligomeric compound complementary to SEQ ID NO: 1 or SEQ ID NO: 2 is capable of reducing the detectable amount of PCDH19 protein in vivo by at least 10%, at least 20%, at least 30%, at least 40%, at least 50%, at least 60%, at least 70%, at least 80%, or at least 90%. In certain embodiments, an oligomeric compound complementary to SEQ ID NO: 1 or SEQ ID NO: 2, is capable of reducing the detectable amount of PCDH19 RNA in the CSF of an animal by at least 10%, at least 20%, at least 30%, at least 40%, at least 50%, at least 60%, at least 70%, at least 80%, or at least 90%. In certain embodiments, an oligomeric compound complementary to SEQ ID NO: 1 or SEQ ID NO: 2, is capable of reducing the detectable amount of PCDH19 protein in the CSF of an animal by at least 10%, at least 20%, at least 30%, at least 40%, at least 50%, at least 60%, at least 70%, at least 80%, or at least 90%.

[0403] In certain embodiments, contacting a cell in an animal with the oligomeric compound ameliorates one or more symptom or hallmark of a neurodevelopmental disease or disorder. In certain embodiments, the neurodevelopmental disease or disorder is PCDH19 Epilepsy. In certain embodiments, the symptom or hallmark is any of seizures, cognitive impairment, intellectual disabilities, autism spectrum disorder, behavioral problems, aggression, anxiety, obsessive-compulsive disorder, hyperactivity, attention deficit disorder (ADD), and attention deficit hyperactivity disorder (ADHD). In certain embodiments, the seizures are any of clusters of seizures, generalized tonic-clonic seizures, or focal seizures, which may evolve to bilateral, tonic-clonic seizures.

### C. Certain Target Nucleic Acids in Certain Tissues

[0404] In certain embodiments, oligomeric compounds comprise or consist of an oligonucleotide comprising a region that is complementary to a target nucleic acid, wherein the target nucleic acid is expressed in a pharmacologically relevant tissue. In certain embodiments, the pharmacologically relevant tissues are the cells and tissues that comprise the central nervous system. Such tissues include the brain and spinal cord.

### IV. Certain Methods and Uses

[0405] Certain embodiments provided herein relate to methods of reducing or inhibiting PCDH19 expression or activity, which can be useful for treating, preventing, or ameliorating a disease associated with PCDH19. In certain embodiments, the disease associated with PCDH19 is a neurodevelopmental disease. In certain embodiments, the disease associated with PCDH19 is PCDH19 Epilepsy.

[0406] In certain embodiments, a method comprises administering to a subject an oligomeric compound, a modified oligonucleotide, an oligomeric duplex, or an antisense agent, any of which having a nucleobase sequence complementary to a PCDH19 nucleic acid. In certain embodiments, the subject has a neurodevelopmental disease. In certain embodiments, the subject has PCDH19 Epilepsy.

[0407] In certain embodiments, a method of treating a disease associated with PCDH19 comprises administering to a subject an oligomeric compound, a modified oligonucleotide, an oligomeric duplex, or an antisense agent, any of which having a nucleobase sequence complementary to a PCDH19 nucleic acid. In certain embodiments, the subject has or is a risk of developing a disease associated with PCDH19. In certain embodiments, the subject has a neurodevelopmental disease. In certain embodiments, the subject has PCDH19 Epilepsy. In certain embodiments, at least one symptom or hallmark of the disease associated with PCDH19 is ameliorated. In certain embodiments, the at least one symptom or hallmark is seizures, cognitive impairment, intellectual disabilities, autism spectrum disorder, behavioral problems, aggression, anxiety, obsessive-compulsive disorder, hyperactivity, attention deficit disorder (ADD), or attention deficit hyperactivity disorder (ADHD). In certain embodiments, the seizures are any of clusters of seizures, generalized tonic-clonic seiaures, focal seizures, or bilateral seizures. In certain embodiments, administration of the oligomeric compound, the modified oligonucleotide, the oligomeric duplex, or the antisense agent to the subject reduces or delays the onset or progression of seizures, cognitive impairment, intellectual disabilities, autism spectrum disorder, behavioral problems, aggression, anxiety, obsessive-compulsive disorder, hyperactivity, attention deficit disorder (ADD), or attention deficit hyperactivity disorder (ADHD) in the subject.

[0408] In certain embodiments, a method of reducing expression of PCDH19 nucleic acid, for example RNA, or reducing expression of PCDH19 protein in a cell comprises contacting the cell with an oligomeric compound, a modified oligonucleotide, an oligomeric duplex, or an antisense agent, any of which having a nucleobase sequence complementary to a PCDH19 nucleic acid. In certain embodiments, the subject has or is a risk of developing a disease associated with PCDH19. In certain embodiments, the subject has a neurodevelopmental disease. In certain embodiments, the subject has PCDH19 Epilepsy. In certain embodiments, the cell is a neuron. In certain embodiments, the cell is a human cell.

[0409] Certain embodiments are drawn to an oligomeric compound, a modified oligonucleotide, an oligomeric duplex, or an antisense agent, any of which having a nucleobase sequence complementary to a PCDH19 nucleic acid, for use in treating a disease associated with PCDH19 or for use in the manufacture of a medicament for treating a disease associated with PCDH19. In certain embodiments, the disease associated with PCDH19 is a neurodevelopmental disease. In certain embodiments, the disease associated with PCDH19 is PCDH19 Epilepsy.

[0410] In any of the methods or uses described herein, the oligomeric compound, the modified oligonucleotide, the oligomeric duplex, or the antisense agent can be any described herein.

### V. Certain Pharmaceutical Compositions

[0411] In certain embodiments, described herein are pharmaceutical compositions comprising one or more oligomeric compounds. In certain embodiments, the one or more oligomeric compounds each consists of a modified oligonucleotide. In certain embodiments, the pharmaceutical composition comprises a pharmaceutically acceptable diluent or carrier. In certain embodiments, a pharmaceutical composition comprises or consists of a sterile saline solution and one or more oligomeric compound. In certain embodiments, the sterile saline is pharmaceutical grade saline. In certain embodiments, a pharmaceutical composition comprises or consists of one or more oligomeric compound and sterile water. In certain embodiments, the sterile water is pharmaceutical grade water. In certain embodiments, a pharmaceutical composition comprises or consists of one or more oligomeric compound and phosphate-buffered saline (PBS). In certain embodiments, the sterile PBS is pharmaceutical grade PBS. In certain embodiments, a pharmaceutical composition comprises or consists of one or more oligomeric compound and artificial cerebrospinal fluid (“artificial CSF” or “aCSF”). In certain embodiments, the artificial cerebrospinal fluid is pharmaceutical grade.

[0412] In certain embodiments, a pharmaceutical composition comprises a modified oligonucleotide and artificial cerebrospinal fluid (aCSF). In certain embodiments, a pharmaceutical composition consists of a modified oligonucleotide and artificial cerebrospinal fluid. In certain embodiments, a pharmaceutical composition consists essentially of a modified oligonucleotide and artificial cerebrospinal fluid. In certain embodiments, the artificial cerebrospinal fluid is pharmaceutical grade.

[0413] In certain embodiments, aCSF comprises sodium chloride, potassium chloride, sodium dihydrogen phosphate dihydrate, sodium phosphate dibasic anhydrous, calcium chloride dihydrate, and magnesium chloride hexahydrate. In certain embodiments, the pH of an aCSF solution is modulated with a suitable pH-adjusting agent, for example, with acids such as hydrochloric acid and alkalis such as sodium hydroxide, to a range of from about 7.1-7.3, or to about 7.2.

[0414] In certain embodiments, pharmaceutical compositions comprise one or more oligomeric compound and one or more excipients. In certain embodiments, excipients are selected from water, salt solutions, alcohol, polyethylene glycols, gelatin, lactose, amylase, magnesium stearate, talc, silicic acid, viscous paraffin, hydroxymethylcellulose and polyvinylpyrrolidone.

[0415] In certain embodiments, oligomeric compounds may be admixed with pharmaceutically acceptable active and/or inert substances for the preparation of pharmaceutical compositions or formulations. Compositions and methods for the formulation of pharmaceutical compositions depend on a number of criteria, including, but not limited to, route of administration, extent of disease, or dose to be administered.

[0416] In certain embodiments, pharmaceutical compositions comprising an oligomeric compound encompass any pharmaceutically acceptable salts of the oligomeric compound, esters of the oligomeric compound, or salts of such esters. In certain embodiments, pharmaceutical compositions comprising oligomeric compounds comprising one or more oligonucleotide, upon administration to an animal, including a human, are capable of providing (directly or indirectly) the biologically active metabolite or residue thereof. Accordingly, for example, the disclosure is also drawn to pharmaceutically acceptable salts of oligomeric compounds, prodrugs, pharmaceutically acceptable salts of such prodrugs, and other bioequivalents. In certain embodiments, pharmaceutically acceptable salts comprise inorganic salts, such as monovalent or divalent inorganic salts. Suitable pharmaceutically acceptable salts include, but are not limited to, sodium and, potassium, calcium, and magnesium salts. In certain embodiments, prodrugs comprise one or more conjugate group attached to an oligonucleotide, wherein the conjugate group is cleaved by endogenous nucleases within the body.

[0417] In certain embodiments, oligomeric compounds are lyophilized and isolated as sodium salts. In certain embodiments, the sodium salt of an oligomeric compound is mixed with a pharmaceutically acceptable diluent. In certain embodiments, the pharmaceutically acceptable diluent comprises sterile saline, sterile water, PBS, or aCSF. In certain embodiments, the sodium salt of an oligomeric compound is mixed with PBS. In certain embodiments, the sodium salt of an oligomeric compound is mixed with aCSF.

[0418] Lipid moieties have been used in nucleic acid therapies in a variety of methods. In certain such methods, the nucleic acid, such as an oligomeric compound, is introduced into preformed liposomes or lipoplexes made of mixtures of cationic lipids and neutral lipids. In certain methods, DNA complexes with mono- or poly-cationic lipids are formed without the presence of a neutral lipid. In certain embodiments, a lipid moiety is selected to increase distribution of a pharmaceutical agent to a particular cell or tissue. In certain embodiments, a lipid moiety is selected to increase distribution of a pharmaceutical agent to fat tissue. In certain embodiments, a lipid moiety is selected to increase distribution of a pharmaceutical agent to muscle tissue.

[0419] In certain embodiments, pharmaceutical compositions comprise a delivery system. Examples of delivery systems include, but are not limited to, liposomes and emulsions. Certain delivery systems are useful for preparing certain pharmaceutical compositions including those comprising hydrophobic compounds. In certain embodiments, certain organic solvents such as dimethylsulfoxide are used.

[0420] In certain embodiments, pharmaceutical compositions comprise one or more tissue-specific delivery molecules designed to deliver the one or more pharmaceutical agents comprising an oligomeric compound provided herein to specific tissues or cell types. For example, in certain embodiments, pharmaceutical compositions include liposomes coated with a tissue-specific antibody.

[0421] In certain embodiments, pharmaceutical compositions comprise a co-solvent system. Certain of such co-solvent systems comprise, for example, benzyl alcohol, a nonpolar surfactant, a water-miscible organic polymer, and an aqueous phase. In certain embodiments, such co-solvent systems are used for hydrophobic compounds. A non-limiting example of such a co-solvent system is the VPD co-solvent system, which is a solution of absolute ethanol comprising 3% w/v benzyl alcohol, 8% w/v of the nonpolar surfactant Polysorbate 80TM and 65% w/v polyethylene glycol 300. The proportions of such co-solvent systems may be varied considerably without significantly altering their solubility and toxicity characteristics. Furthermore, the identity of co-solvent components may be varied: for example, other surfactants may be used instead of Polysorbate 80TM; the fraction size of polyethylene glycol may be varied; other biocompatible polymers may replace polyethylene glycol, e.g., polyvinyl pyrrolidone; and other sugars or polysaccharides may substitute for dextrose.

[0422] In certain embodiments, pharmaceutical compositions are prepared for oral administration. In certain embodiments, pharmaceutical compositions are prepared for buccal administration. In certain embodiments, a pharmaceutical composition is prepared for administration by injection (e.g., intravenous, subcutaneous, intramuscular, intrathecal (IT), intracerebroventricular (ICV), intraneural, perineural, etc.). In certain of such embodiments, a pharmaceutical composition comprises a carrier and is formulated in aqueous solution, such as water or physiologically compatible buffers such as Hanks's solution, Ringer's solution, or physiological saline buffer. In certain embodiments, other ingredients are included (e.g., ingredients that aid in solubility or serve as preservatives). In certain embodiments, injectable suspensions are prepared using appropriate liquid carriers, suspending agents and the like. Certain pharmaceutical compositions for injection are presented in unit dosage form, e.g., in ampoules or in multi-dose containers. Certain pharmaceutical compositions for injection are suspensions, solutions or emulsions in oily or aqueous vehicles, and may contain formulatory agents such as suspending, stabilizing and/or dispersing agents. Certain solvents suitable for use in pharmaceutical compositions for injection include, but are not limited to, lipophilic solvents and fatty oils, such as sesame oil, synthetic fatty acid esters, such as ethyl oleate or triglycerides, and liposomes.

[0423] Under certain conditions, certain compounds disclosed herein act as acids. Although such compounds may be drawn or described in protonated (free acid) form, or ionized and in association with a cation (salt) form, aqueous solutions of such compounds exist in equilibrium among such forms. For example, a phosphate linkage of an oligonucleotide in aqueous solution exists in equilibrium among free acid, anion and salt forms. Unless otherwise indicated, compounds described herein are intended to include all such forms. Moreover, certain oligonucleotides have several such linkages, each of which is in equilibrium. Thus, oligonucleotides in solution exist in an ensemble of forms at multiple positions all at equilibrium. The term “oligonucleotide” is intended to include all such forms. Drawn structures necessarily depict a single form. Nevertheless, unless otherwise indicated, such drawings are likewise intended to include corresponding forms. Herein, a structure depicting the free acid of a compound followed by the term “or salt thereof” or “or a pharmaceutically acceptable salt thereof” expressly includes all such forms that may be fully or partially protonated/de-protonated/in association with a cation or a combination of cations. In certain embodiments, one or more specific cation is identified. The cations include, but are not limited to, sodium, potassium, calcium, and magnesium. In certain embodiments, a structure depicting the free acid of a compound followed by the term “or a pharmaceutically acceptable salt thereof” expressly includes all such forms that may be fully or partially protonated/de-protonated/in association with one or more cations selected from sodium, potassium, calcium, and magnesium.

[0424] In certain embodiments, modified oligonucleotides or oligomeric compounds are in aqueous solution with sodium. In certain embodiments, modified oligonucleotides or oligomeric compounds are in aqueous solution with potassium. In certain embodiments, modified oligonucleotides or oligomeric compounds are in PBS. In certain embodiments, modified oligonucleotides or oligomeric compounds are in water. In certain such embodiments, the pH of the solution is adjusted with NaOH and/or HCl to achieve a desired pH.

[0425] Herein, certain specific doses are described. A dose may be in the form of a dosage unit. For clarity, a dose (or dosage unit) of a modified oligonucleotide or an oligomeric compound in milligrams indicates the mass of the free acid form of the modified oligonucleotide or oligomeric compound. As described above, in aqueous solution, the free acid is in equilibrium with anionic and salt forms. However, for the purpose of calculating dose, it is assumed that the modified oligonucleotide or oligomeric compound exists as a solvent-free, sodium-acetate free, anhydrous, free acid.

[0426] In certain embodiments, where a modified oligonucleotide or an oligomeric compound is in solution comprising sodium (e.g., saline), the modified oligonucleotide or oligomeric compound may be partially or fully de-protonated and in association with sodium ions. However, the mass of the protons is nevertheless counted toward the weight of the dose, and the mass of the sodium ions is not counted toward the weight of the dose. Thus, for example, a dose, or dosage unit, of 10 mg of a number of fully protonated molecules that weighs 10 mg. This would be equivalent to 10.59 mg of solvent-free, sodium acetate-free, anhydrous sodiated Compound No. 1549516. In certain embodiments, where a modified oligonucleotide or oligomeric compound is in a solution, such as aCSF, comprising sodium, potassium, calcium, and magnesium, the modified oligonucleotide or oligomeric compound may be partially or fully de-protonated and in association with sodium, potassium, calcium, and/or magnesium. However, the mass of the protons is nevertheless counted toward the weight of the dose, and the mass of the sodium, potassium, calcium, and magnesium ions is not counted toward the weight of the dose.

[0427] In certain embodiments, when an oligomeric compound comprises a conjugate group, the mass of the conjugate group may be included in calculating the dose of such oligomeric compound. If the conjugate group also has an acid, the conjugate group is likewise assumed to be fully protonated for the purpose of calculating dose.

### VI. Certain Hotspot Regions

[0428] In certain embodiments, nucleobases in the ranges specified below comprise a hotspot region of a PCDH19 nucleic acid. In certain embodiments, modified oligonucleotides that are complementary to a hotspot region of PCDH19 nucleic acid achieve an average of more than 50% reduction of PCDH19 RNA in the standard in vitro assay. In certain embodiments, modified oligonucleotides that are complementary to a hotspot region of PCDH19 nucleic acid achieve an average of 50% or greater reduction of PCDH19 RNA in vivo in the standard in vivo assay.

### 1. Nucleobases 4743-4767 of SEQ ID NO: 1

[0429] In certain embodiments, nucleobases 4743-4767 of SEQ ID NO: 1 comprise a hotspot region. In certain embodiments, modified oligonucleotides are complementary to a portion of nucleobases 4743-4767 of SEQ ID NO: 1. In certain embodiments, modified oligonucleotides are 20 nucleobases in length. In certain embodiments, modified oligonucleotides are gapmers. In certain embodiments, the gapmers are MOE gapmers. In certain embodiments, the internucleoside linkages of the modified oligonucleotides are phosphorothioate internucleoside linkages and phosphodiester internucleoside linkages.

[0430] The nucleobase sequences of SEQ ID NOs: 132, 228, 284, 330, and 440 are complementary to nucleobases 4743-4767 of SEQ ID NO: 1.

[0431] The nucleobase sequences of Compound Nos: 1549744, 1549855, 1549749, 1549523, and 1549712 are complementary to nucleobases 4743-4767 of SEQ ID NO: 1.

[0432] In certain embodiments, modified oligonucleotides complementary to a portion of nucleobases 4743-4767 of SEQ ID NO: 1 achieve at least 81% reduction of PCDH19 mRNA in the standard in vitro assay. In certain embodiments, modified oligonucleotides complementary to a portion of nucleobases 4743-4767 of SEQ ID NO: 1 achieve an average of 86% reduction of PCDH19 mRNA in the standard in vitro assay.

### 2. Nucleobases 12,319-12,346 of SEQ ID NO: 1

[0433] In certain embodiments, nucleobases 12,319-12,346 of SEQ ID NO: 1 comprise a hotspot region. In certain embodiments, modified oligonucleotides are complementary to a portion of nucleobases 12,319-12,346 of SEQ ID NO: 1. In certain embodiments, modified oligonucleotides are 20 nucleobases in length. In certain embodiments, modified oligonucleotides are gapmers. In certain embodiments, the gapmers are MOE gapmers. In certain embodiments, the internucleoside linkages of the modified oligonucleotides are phosphorothioate internucleoside linkages and phosphodiester internucleoside linkages.

[0434] The nucleobase sequences of SEQ ID NOs: 416, 72, 129, and 204 are complementary to nucleobases 12,319-12,346 of SEQ ID NO: 1.

[0435] The nucleobase sequences of Compound Nos: 1549581, 1549876, 1549736, and 1549694 are complementary to nucleobases 12,319-12,346 of SEQ ID NO: 1.

[0436] In certain embodiments, modified oligonucleotides complementary to a portion of nucleobases 12,319-12,346 of SEQ ID NO: 1 achieve at least 65% reduction of PCDH19 mRNA in the standard in vitro assay. In certain embodiments, modified oligonucleotides complementary to a portion of nucleobases 12,319-12,346 of SEQ ID NO: 1 achieve an average of 69% reduction of PCDH19 mRNA in the standard in vitro assay.

### 3. Nucleobases 34364-34389 of SEQ ID NO: 1

[0437] In certain embodiments, nucleobases 34364-34389 of SEQ ID NO: 1 comprise a hotspot region. In certain embodiments, modified oligonucleotides are complementary to a portion of nucleobases 34364-34389 of SEQ ID NO: 1. In certain embodiments, modified oligonucleotides are 20 nucleobases in length. In certain embodiments, modified oligonucleotides are gapmers. In certain embodiments, the gapmers are MOE gapmers. In certain embodiments, the internucleoside linkages of the modified oligonucleotides are phosphorothioate internucleoside linkages and phosphodiester internucleoside linkages.

[0438] The nucleobase sequences of SEQ ID NOs: 371, 425, 20, and 111 are complementary to nucleobases 34364-34389 of SEQ ID NO: 1.

[0439] The nucleobase sequences of Compound Nos: 1549753, 1549642, 1549562, and 1549613 are complementary to nucleobases 34364-34389 of SEQ ID NO: 1.

[0440] In certain embodiments, modified oligonucleotides complementary to a portion of nucleobases 34364-34389 of SEQ ID NO: 1 achieve at least 64% reduction of 34389 of SEQ ID NO: 1 achieve an average of 80% reduction of PCDH19. In certain embodiments, modified oligonucleotides complementary to a portion of nucleobases 34364-34389 of SEQ ID NO: 1 achieve an average of 80% reduction of PCDH19 mRNA in the standard in vitro assay.

### 4. Nucleobases 84,408-84,431 of SEQ ID NO: 1

[0441] In certain embodiments, nucleobases 84,408-84,431 of SEQ ID NO: 1 comprise a hotspot region. In certain embodiments, modified oligonucleotides are complementary to a portion of nucleobases 84,408-84,431 of SEQ ID NO: 1. In certain embodiments, modified oligonucleotides are 20 nucleobases in length. In certain embodiments, modified oligonucleotides are gapmers. In certain embodiments, the gapmers are MOE gapmers. In certain embodiments, the internucleoside linkages of the modified oligonucleotides are phosphorothioate internucleoside linkages and phosphodiester internucleoside linkages.

[0442] The nucleobase sequences of SEQ ID NOs: 367, 407, 24, 93, and 218 are complementary to nucleobases 84,408-84,431 of SEQ ID NO: 1.

[0443] The nucleobase sequences of Compound Nos: 1549714, 1549528, 1549617, 1549514, and 1549790 are complementary to nucleobases 84,408-84,431 of SEQ ID NO: 1.

[0444] In certain embodiments, modified oligonucleotides complementary to a portion of nucleobases 84,408-84,431 of SEQ ID NO: 1 achieve at least 65% reduction of PCDH19 mRNA in the standard in vitro assay. In certain embodiments, modified oligonucleotides complementary to a portion of nucleobases 84,408-84,431 of SEQ ID NO: 1 achieve an average of 74% reduction of PCDH19 mRNA in the standard in vitro assay.

### Nonlimiting Disclosure and Incorporation by Reference

[0445] Each of the literature and patent publications listed herein is incorporated by reference in its entirety.

[0446] While certain compounds, compositions and methods described herein have been described with specificity in accordance with certain embodiments, the following examples serve only to illustrate the compounds described herein and are not intended to limit the same. Each of the references, GenBank accession numbers, and the like recited in the present application is incorporated herein by reference in its entirety.

[0447] Although the sequence listing accompanying this filing identifies each sequence as either “RNA” or “DNA” as required, in reality, those sequences may be modified with any combination of chemical modifications. One of skill in the art will readily appreciate that such designation as “RNA” or “DNA” to describe modified oligonucleotides is, in certain instances, arbitrary. For example, an oligonucleotide comprising a nucleoside comprising a 2′-OH sugar moiety and a thymine base could be described as a DNA having a modified sugar moiety (2′-OH in place of one 2′-H of DNA) or as an RNA having a modified base (thymine (methylated uracil) in place of a uracil of RNA). Accordingly, nucleic acid sequences provided herein, including, but not limited to those in the sequence listing, are intended to encompass nucleic acids containing any combination of natural or modified RNA and/or DNA, unless otherwise stated, including, but not limited to such nucleic acids having modified nucleobases. By way of further example and without limitation, an oligomeric compound having the nucleobase sequence “ATCGATCG” encompasses any oligomeric compounds having such nucleobase sequence, whether modified or unmodified, including, but not limited to, such compounds comprising RNA bases, such as those having sequence “AUCGAUCG” and those having some DNA bases and some RNA bases such as “AUCGATCG” and oligomeric compounds having other modified nucleobases, such as “AT”CGAUCG,” wherein mC indicates a cytosine base comprising a methyl group at the 5-position. Finally, for clarity, unless otherwise indicated, the phrase “nucleobase sequence of SEQ ID NO: X”, refers only to the sequence of nucleobases in that SEQ ID NO: X, independent of any sugar or internucleoside linkage modifications also described in such SEQ ID.

[0448] While effort has been made to accurately describe compounds in the accompanying sequence listing, should there be any discrepancies between a description in this specification and in the accompanying sequence listing, the description in the specification and not in the sequence listing is the accurate description.

[0449] Certain compounds described herein (e.g., modified oligonucleotides) have one or more asymmetric center and thus give rise to enantiomers, diastereomers, and other stereoisomeric configurations that may be defined, in terms of absolute stereochemistry, as (R) or(S), as a or β such as for sugar anomers, or as (D) or (L), such as for amino acids, etc. Compounds provided herein that are drawn or described as having certain stereoisomeric configurations include only the indicated compounds. Compounds provided herein that are drawn or described with undefined stereochemistry include all such possible isomers, including their stereorandom and optically pure forms, unless specified otherwise. Likewise, all cis- and trans-isomers and tautomeric forms of the compounds herein are also included unless otherwise indicated. Oligomeric compounds described herein include chirally pure or enriched mixtures as well as racemic mixtures. For example, oligomeric compounds having a plurality of phosphorothioate internucleoside linkages include such compounds in which chirality of the phosphorothioate internucleoside linkages is controlled or is random. Unless otherwise indicated, compounds described herein are intended to include corresponding salt forms.

[0450] The compounds described herein include variations in which one or more atoms are replaced with a non-radioactive isotope or radioactive isotope of the indicated element. For example, compounds herein that comprise hydrogen atoms encompass all possible deuterium substitutions for each of the ¹H hydrogen atoms. Isotopic substitutions encompassed by the compounds herein include but are not limited to: ²H or ³H in place of ¹H, ¹³C or ¹⁴C. in place of ¹²C, ¹⁵N in place of ¹⁴N, ¹⁷O or ¹⁸O in place of ¹⁶O, and ³³S, ³⁴S, ³⁵S, or ³⁶S in place of ³²S. In certain embodiments, non-radioactive isotopic substitutions may impart new properties on the oligomeric compound that are beneficial for use as a therapeutic or research tool. In certain embodiments, radioactive isotopic substitutions may make the compound suitable for research or diagnostic purposes such as imaging.

### EXAMPLES

[0451] The following examples illustrate certain embodiments of the present disclosure and are not limiting. Moreover, where specific embodiments are provided, the inventors have contemplated generic application of those specific embodiments.

### Example 1: Effect of 5-10-5 MOE Modified Oligonucleotides with Mixed PS/PO Internucleoside Linkages Complementary to a Human PCDH19 RNA In Vitro, Single Dose

[0452] Modified oligonucleotides complementary to human PCDH19 nucleic acid were designed and tested for their single dose effects on PCDH19 RNA in vitro. The modified oligonucleotides were tested in a series of experiments that had the same culture conditions.

[0453] The modified oligonucleotides in the table below are 5-10-5 MOE modified oligonucleotides with mixed PS/PO internucleoside linkages. The modified oligonucleotides are 20 nucleosides in length. The sugar motif for the modified oligonucleotides is (from 5′ to 3′): eeeeeddddddddddeeeee; wherein each “d” represents a 2′-β-D-deoxyribosyl sugar moiety, and each “e” represents a 2′-MOE ribosyl sugar moiety. The internucleoside linkage motif for the modified oligonucleotides is (from 5′ to 3′): soooossssssssssooss; wherein each “s” represents a phosphorothioate internucleoside linkage and each “o” represents a phosphodiester internucleoside linkage. Each cytosine residue is a 5-methylcytosine.

[0454] “Start site” indicates the 5′-most nucleoside to which the modified oligonucleotide is complementary in the target nucleic acid sequence. “Stop site” indicates the 3′-most nucleoside to which the modified oligonucleotide is complementary in the target nucleic acid sequence. Each modified oligonucleotide listed in the table below is 100% complementary to SEQ ID NO: 1 (ENSEMBL Accession No. ENSG00000165194.15 from version 104: May 2021), to SEQ ID NO: 2 (the cDNA of ENSEMBL Accession No. ENST00000373034.8 from version 104: May2021), or to both. “N/A” indicates that the modified oligonucleotide is not 100% complementary to that particular target nucleic acid sequence.

[0455] SHSY5Y cells, plated at a density of 15,000 cells/well, were differentiated in Neurobasal media supplemented with B27 (ThermoFisher), penicillin/streptomycin (ThermoFisher), and 10 μM retinoic acid (Sigma) for 10 days. Differentiated SH-SY5Y cells were treated with modified oligonucleotide at a concentration of 15,000 nM by free uptake. After a treatment period of approximately 5 days, total RNA was isolated from the cells and PCDH19 RNA levels were measured by quantitative real-time RT-PCR using human primer-probe set RTS53390 (forward sequence GCTAACCACATCTACCATCACTC, designated herein as SEQ ID NO: 3; reverse sequence GCTATTCACGTAGTTGGAGTCA, designated herein as SEQ ID NO: 4; probe sequence TTTCAGTCTCAGGCAGAGGCACAC, designated herein as SEQ ID NO: 5). PCDH19 RNA levels were normalized to total RNA content, as measured by RIBOGREEN®. Reduction of PCDH19 RNA is presented in the table below as percent PCDH19 RNA relative to the amount in untreated control cells (% UTC).

[0456] Each separate experiment described in this example is identified by an Assay Identification letter in the table column labeled “AID”.

TABLE 1
Reduction of PCDH19 RNA by 5-10-5 MOE modified oligonucleotides with mixed PS/PO internucleoside
linkages at a concentration of 15,000 nM in differentiated SH-SY5Y cells

| | SEQ ID | SEQ ID | SEQ ID | SEQ | | | | |
|---|---|---|---|---|---|---|---|---|
| | NO: 1 | NO: 1 | NO: 2 | ID NO: | | | | |
| Compound | Start | Stop | Start | 2 Stop | | PCDH19 | | SEQ ID |
| No. | Site | Site | Site | Site | Sequence (5′ to 3′) | (% UTC) | AID | NO |
| 1549516 | 21259 | 21278 | N/A | N/A | GCTTCTTTATTAATTACCCA | 36 | A | 15 |
| 1549535 | 117328 | 117347 | 8454 | 8473 | ACTGCTATTATGTACAATAA | 74 | A | 16 |
| 1549542 | 60204 | 60223 | N/A | N/A | TTCTTTTTCTCTCTCATCTA | 17 | A | 17 |
| 1549557 | 52717 | 52736 | N/A | N/A | CCCACTATTTTCATCACATC | 27 | A | 18 |
| 1549558 | 41754 | 41773 | N/A | N/A | GCTTGTTTTCTTCCTCTCCT | 3 | A | 19 |
| 1549562 | 34367 | 34386 | N/A | N/A | GCTGTCACTTTTCCATACTA | 8 | A | 20 |
| 1549589 | 25522 | 25541 | N/A | N/A | ACATCATTTTTCATGTGGTC | 9 | A | 21 |
| 1549605 | 72604 | 72623 | N/A | N/A | ATTCTCTCTCATTTCCACCC | 9 | A | 22 |
| 1549612 | 18035 | 18054 | N/A | N/A | GTTAGCTTTCTTTCCATTTC | 27 | A | 23 |
| 1549617 | 84410 | 84429 | N/A | N/A | TTGTTTTTTTCATATCCCTA | 13 | A | 24 |
| 1549620 | 6722 | 6741 | 3936 | 3955 | CTTAGGCTCACTTTCTCCTC | 80 | A | 25 |
| 1549626 | 68244 | 68263 | 4397 | 4416 | GGTCACTCTCCTCATGTCCA | 10 | A | 26 |
| 1549632 | 59780 | 59799 | N/A | N/A | GTTTATTTACTTTTTTATGC | 52 | A | 27 |
| 1549640 | 80014 | 80033 | N/A | N/A | CATCATTCCTCTTTTTCCTC | 11 | A | 28 |
| 1549647 | 45631 | 45650 | N/A | N/A | GCTTAGTTATATCTCACCCC | 47 | A | 29 |
| 1549651 | 114228 | 114247 | 5354 | 5373 | TCTCTGTTTCCCCAACATCA | 11 | A | 30 |
| 1549652 | 11035 | 11054 | N/A | N/A | GCACTTATCATTCTATGCTA | 22 | A | 31 |
| 1549659 | 54750 | 54769 | N/A | N/A | TTTGATGCTTTTACTCTACT | 13 | A | 32 |
| 1549660 | 114366 | 114385 | 5492 | 5511 | CCAGAGCTTTTTTTTTTCAC | 27 | A | 33 |
| 1549665 | 29518 | 29537 | N/A | N/A | GCCTGCTTTCTGCTTCAATC | 52 | A | 34 |
| 1549672 | 19426 | 19445 | N/A | N/A | GCTCTTTTCTGATAACCTAT | 34 | A | 35 |
| 1549682 | 4951 | 4970 | N/A | N/A | GCATCATTCATTTTCAGCAA | 29 | A | 36 |
| 1549684 | 64160 | 64179 | N/A | N/A | CCATGTTTCTATTACTGCTC | 66 | A | 37 |
| 1549688 | 82577 | 82596 | N/A | N/A | ATTTTTATCTTATTTCATTC | 114 | A | 38 |
| 1549704 | 6274 | 6293 | N/A | N/A | ACTGTGCCTTATTCTCACTC | 11 | A | 39 |
| 1549705 | 30259 | 30278 | N/A | N/A | GCTGCTTCTTTCTTTACTTT | 18 | A | 40 |
| 1549708 | 82507 | 82526 | N/A | N/A | TTCTGATTTTGATCCTCACT | 62 | A | 41 |
| 1549720 | 39476 | 39495 | N/A | N/A | TGCATTTTTTCCTATAATCT | 38 | A | 42 |
| 1549724 | 95382 | 95401 | N/A | N/A | CATCTTGTCTCCATTCCATA | 31 | A | 43 |
| 1549725 | 93272 | 93291 | N/A | N/A | CTTTGTTTCCTACTGCCATA | 13 | A | 44 |
| 1549727 | 115538 | 115557 | 6664 | 6683 | TGACATATTTCTTTAGTTTA | 35 | A | 45 |
| 1549728 | 23346 | 23365 | N/A | N/A | TCATAGTCTCCATTTATCCA | 34 | A | 46 |
| 1549733 | 118288 | 118307 | 9414 | 9433 | GCATCCCTCTAAATTTCCAC | 14 | A | 47 |
| 1549735 | 98283 | 98302 | N/A | N/A | AGCAGTTTTAATCCTTCCTC | 59 | A | 48 |
| 1549740 | 33164 | 33183 | N/A | N/A | ATGTTTATTTCTCTATGCCT | 48 | A | 49 |
| 1549743 | 76485 | 76504 | N/A | N/A | GTTTGTTTTTTTCCTCTTCA | 12 | A | 50 |
| 1549750 | 95898 | 95917 | N/A | N/A | GCTTGCCTTTTTTTCTTCCC | 31 | A | 51 |
| 1549755 | 12335 | 12354 | N/A | N/A | CCTACTATCTTTCTTCTCCA | 11 | A | 52 |
| 1549764 | 55287 | 55306 | N/A | N/A | CTTTTTTATTTCATCTCAGT | 71 | A | 53 |
| 1549775 | 111784 | 111803 | N/A | N/A | ATGGACACTTTCATCCCCCT | 32 | A | 54 |
| 1549781 | 412 | 431 | 412 | 431 | CTTGATTTCATCTTCCCGGA | 20 | A | 55 |
| 1549782 | 64802 | 64821 | N/A | N/A | CTGCTTTGTCTTCACTTCTC | 48 | A | 56 |
| 1549814 | 12310 | 12329 | N/A | N/A | CTTCTTTTTCAACCTCCTTT | 103 | A | 57 |
| 1549821 | 43462 | 43481 | N/A | N/A | ACTTTATTAGTCTACTTCTT | 97 | A | 58 |
| 1549824 | 25784 | 25803 | N/A | N/A | CCTATTTATTCTTCCATACA | 88 | A | 59 |
| 1549834 | 78893 | 78912 | N/A | N/A | GAGTCTGTTTTATCTATCCA | 20 | A | 60 |
| 1549838 | 15892 | 15911 | N/A | N/A | GTGATTTTTCTCCCTCCCCA | 54 | A | 61 |
| 1549839 | 70900 | 70919 | N/A | N/A | TCTATTTTCCCTTCTCACCT | 86 | A | 62 |
| 1549841 | 4534 | 4553 | N/A | N/A | GCTATTTTTACTGAAACATC | 7 | A | 63 |
| 1549843 | 114008 | 114027 | 5134 | 5153 | GGTTTCTTTCTCTTCTTCCT | 33 | A | 64 |
| 1549851 | 43971 | 43990 | N/A | N/A | TTCTCATTTTTACTGCCTCA | 38 | A | 65 |
| 1549852 | 25734 | 25753 | N/A | N/A | ATATTCTCTTTTTCCCTCCC | 17 | A | 66 |
| 1549860 | 7476 | 7495 | 4018 | 4037 | GCGGATGTCATTCTTACTGA | 36 | A | 67 |
| 1549862 | 118347 | 118366 | 9473 | 9492 | AACAATTTTATCTTCATATA | 107 | A | 68 |
| 1549864 | 115868 | 115887 | 6994 | 7013 | GTTCTTTTTCAGAAATGTTC | 55 | A | 69 |
| 1549868 | 115178 | 115197 | 6304 | 6323 | ACTGCTTACTCTATCCCTAC | 68 | A | 70 |
| 1549873 | 52791 | 52810 | N/A | N/A | CCTTGTGTCATTTTTTTCTC | 26 | A | 71 |
| 1549876 | 12320 | 12339 | N/A | N/A | CTCCATTTTCCTTCTTTTTC | 30 | A | 72 |
| 1549880 | 17979 | 17998 | N/A | N/A | CTTCTTTTTCTATTTCTAAA | 120 | A | 73 |
| 1549884 | 38627 | 38646 | N/A | N/A | TGCCTTATTTTTCTCCATAT | 62 | A | 74 |
| 1549887 | 10648 | 10667 | N/A | N/A | GTGTCATTTTCCCTACGCAG | 1 | A | 75 |
| 1549895 | 25884 | 25903 | N/A | N/A | ACTCATTTTCCATCTATGAA | 32 | A | 76 |
| 1549896 | 49308 | 49327 | N/A | N/A | GCTTCTCATTTTATTTGGGA | 33 | A | 77 |
| 1549908 | 20421 | 20440 | N/A | N/A | GCTGGTATTTTTCTTTGTGC | 64 | A | 78 |
| 1549910 | 13019 | 13038 | N/A | N/A | CTGATGTTTTATTTTCATTA | 62 | A | 79 |
| 1549911 | 36819 | 36838 | N/A | N/A | GCTTCAGTTTTTAACCTCTC | 11 | A | 80 |
| 1549912 | 63480 | 63499 | N/A | N/A | GTTCATTTCCTATTTCATTT | 27 | A | 81 |
| 1549915 | 115316 | 115335 | 6442 | 6461 | GTTCACATTTTTAATCAAAA | 6 | A | 82 |
| 1549918 | 107500 | 107519 | N/A | N/A | TCTATATTTTCTGCTACCTT | 88 | A | 83 |
| 1549923 | 47992 | 48011 | N/A | N/A | GTACACCCTTTCCTCATCCT | 65 | A | 84 |
| 1549930 | 117940 | 117959 | 9066 | 9085 | GCATCATCAGTTTTCCCTAA | 54 | A | 85 |
| 1549937 | 85958 | 85977 | N/A | N/A | ACTTGTTTGATTTTCATCCT | 11 | A | 86 |
| 1549944 | 73355 | 73374 | N/A | N/A | CCAATCTCATATCAGGATTA | 55 | A | 87 |
| | 75767 | 75786 | | | | | | |
| 1549950 | 72467 | 72486 | N/A | N/A | AAGAGGATCTTAAAAGCTAT | 26 | A | 88 |
| | 75978 | 75997 | | | | | | |
| 1549973 | 73148 | 73167 | N/A | N/A | CTTGTCAATCACTCTTTTTA | 14 | A | 89 |
| | 75560 | 75579 | | | | | | |
| 1549980 | 73316 | 73335 | N/A | N/A | TGGGATATCCACATCATCAA | 4 | A | 90 |
| | 75728 | 75747 | | | | | | |
| 1549990 | 73218 | 73237 | N/A | N/A | AAATTCAAGCCCCATGATAC | 152 | A | 91 |
| | 75630 | 75649 | | | | | | |
| 1549991 | 73210 | 73229 | N/A | N/A | GCCCCATGATACCCCTAATC | 39 | A | 92 |
| | 75622 | 75641 | | | | | | |
| 1549514 | 84411 | 84430 | N/A | N/A | GTTGTTTTTTTCATATCCCT | 32 | B | 93 |
| 1549520 | 17980 | 17999 | N/A | N/A | ACTTCTTTTTCTATTTCTAA | 10 | B | 94 |
| 1549526 | 59851 | 59870 | N/A | N/A | CGTACATTTTCATACCAAGA | 10 | B | 95 |
| 1549532 | 118348 | 118367 | 9474 | 9493 | CAACAATTTTATCTTCATAT | 59 | B | 96 |
| 1549538 | 114367 | 114386 | 5493 | 5512 | TCCAGAGCTTTTTTTTTTCA | 71 | B | 97 |
| 1549543 | 95396 | 95415 | N/A | N/A | CCCACTCCTCTTCTCATCTT | 165 | B | 98 |
| 1549546 | 46229 | 46248 | N/A | N/A | CCATTTTCTTCCTTCATCAT | 25 | B | 99 |
| 1549553 | 87014 | 87033 | N/A | N/A | ACCAGCTATTTCCTTCCATC | 53 | B | 100 |
| 1549569 | 78959 | 78978 | N/A | N/A | GCTTTATATTCTCTCTACCT | 62 | B | 101 |
| 1549577 | 31478 | 31497 | N/A | N/A | CTGCACACTTCTTCACTCCC | 21 | B | 102 |
| 1549582 | 82580 | 82599 | N/A | N/A | GATATTTTTATCTTATTICA | 102 | B | 103 |
| 1549586 | 52767 | 52786 | N/A | N/A | GCATTTGTTCTACCTCATTC | 91 | B | 104 |
| 1549591 | 38630 | 38649 | N/A | N/A | TTCTGCCTTATTTTTCTCCA | 50 | B | 105 |
| 1549594 | 27059 | 27078 | N/A | N/A | ACTCACATTGAATCCTCACA | 51 | B | 106 |
| 1549601 | 13020 | 13039 | N/A | N/A | ACTGATGTTTTATTTTCATT | 75 | B | 107 |
| 1549604 | 12311 | 12330 | N/A | N/A | CCTTCTTTTTCAACCTCCTT | 43 | B | 108 |
| 1549610 | 114009 | 114028 | 5135 | 5154 | TGGTTTCTTTCTCTTCTTCC | 26 | B | 109 |
| 1549611 | 112143 | 112162 | N/A | N/A | CTTCCTTGTATACTTGTATT | 50 | B | 110 |
| 1549613 | 34370 | 34389 | N/A | N/A | GTTGCTGTCACTTTTCCATA | 5 | B | 111 |
| 1549618 | 60582 | 60601 | N/A | N/A | GTTTCATTTCTATTATTTTA | 58 | B | 112 |
| 1549629 | 39477 | 39496 | N/A | N/A | ATGCATTTTTTCCTATAATC | 30 | B | 113 |
| 1549631 | 18217 | 18236 | N/A | N/A | GTACGGATTTTTCTCCACCT | 135 | B | 114 |
| 1549643 | 25735 | 25754 | N/A | N/A | TATATTCTCTTTTTCCCTCC | 26 | B | 115 |
| 1549653 | 70901 | 70920 | N/A | N/A | TTCTATTTTCCCTTCTCACC | 17 | B | 116 |
| 1549654 | 21405 | 21424 | N/A | N/A | ACTTTTGTTTTACACATTCC | 12 | B | 117 |
| 1549655 | 76652 | 76671 | N/A | N/A | GTGCTCCTTTTACATATCCT | 29 | B | 118 |
| 1549664 | 43972 | 43991 | N/A | N/A | TTTCTCATTTTTACTGCCTC | 32 | B | 119 |
| 1549675 | 51765 | 51784 | N/A | N/A | GCACTTTTCTTTGCTCTCAT | 114 | B | 120 |
| 1549679 | 10719 | 10738 | N/A | N/A | GCTCTTCTATAGATTTCATT | 78 | B | 121 |
| 1549687 | 33294 | 33313 | N/A | N/A | ACTTTTGGTTCCCTCTCTTT | 142 | B | 122 |
| 1549691 | 5397 | 5416 | N/A | N/A | CCCACATTTTTCTCCTATAA | 18 | B | 123 |
| 1549700 | 7441 | 7460 | 3983 | 4002 | TTGATTTCTTTTGATGCCCA | 6 | B | 124 |
| 1549706 | 6393 | 6412 | N/A | N/A | GTCATTTATTACTTTGCACA | 23 | B | 125 |
| 1549721 | 15893 | 15912 | N/A | N/A | AGTGATTTTTCTCCCTCCCC | 112 | B | 126 |
| 1549723 | 11811 | 11830 | N/A | N/A | GCTATCTTCCATTCAGCACT | 84 | B | 127 |
| 1549730 | 64162 | 64181 | N/A | N/A | GCCCATGTTTCTATTACTGC | 13 | B | 128 |
| 1549736 | 12323 | 12342 | N/A | N/A | CTTCTCCATTTTCCTTCTTT | 35 | B | 129 |
| 1549737 | 25785 | 25804 | N/A | N/A | TCCTATTTATTCTTCCATAC | 12 | B | 130 |
| 1549742 | 68853 | 68872 | N/A | N/A | GTTTGGTATTTTCTATCCTC | 42 | B | 131 |
| 1549744 | 4743 | 4762 | N/A | N/A | GTTTCTTCTTTTCTCCCTTT | 12 | B | 132 |
| 1549754 | 63481 | 63500 | N/A | N/A | TGTTCATTTCCTATTTCATT | 89 | B | 133 |
| 1549758 | 12547 | 12566 | N/A | N/A | TGCATTTTCTTCCTCCAATA | 38 | B | 134 |
| 1549762 | 20492 | 20511 | N/A | N/A | GCTTATTTTTTAATTTAGTT | 76 | B | 135 |
| 1549763 | 80015 | 80034 | N/A | N/A | ACATCATTCCTCTTTTTCCT | 34 | B | 136 |
| 1549765 | 64905 | 64924 | N/A | N/A | GTTAATTTCTTCTAACATTA | 75 | B | 137 |
| 1549771 | 415 | 434 | 415 | 434 | CGTCTTGATTTCATCTTCCC | 42 | B | 138 |
| 1549772 | 20106 | 20125 | N/A | N/A | ACTTATGCTTTCTCTATGTC | 19 | B | 139 |
| 1549783 | 93274 | 93293 | N/A | N/A | TTCTTTGTTTCCTACTGCCA | 38 | B | 140 |
| 1549785 | 117943 | 117962 | 9069 | 9088 | TCAGCATCATCAGTTTTCCC | 53 | B | 141 |
| 1549799 | 118292 | 118311 | 9418 | 9437 | ACTTGCATCCCTCTAAATTT | 99 | B | 142 |
| 1549804 | 41756 | 41775 | N/A | N/A | ATGCTTGTTTTCTTCCTCTC | 6 | B | 143 |
| 1549810 | 29593 | 29612 | N/A | N/A | TCTGATTCTTATTCCTCCCA | 72 | B | 144 |
| 1549827 | 38616 | 38635 | N/A | N/A | TCTCCATATCACTTATCTTC | 84 | B | 145 |
| 1549828 | 107642 | 107661 | N/A | N/A | GTCACCTTTTCATTTATCCA | 121 | B | 146 |
| 1549833 | 43468 | 43487 | N/A | N/A | GCACAGACTTTATTAGTCTA | 21 | B | 147 |
| 1549840 | 7508 | 7527 | 4050 | 4069 | TTGTCTGTCTCCTCCACATC | 95 | B | 148 |
| 1549846 | 56043 | 56062 | N/A | N/A | GTATATTTTTTCACACTTCT | 77 | B | 149 |
| 1549853 | 115539 | 115558 | 6665 | 6684 | GTGACATATTTCTTTAGTTT | 39 | B | 150 |
| 1549867 | 25672 | 25691 | N/A | N/A | TCTTCCTTTTATTTAGTTAA | 70 | B | 151 |
| 1549871 | 106274 | 106293 | N/A | N/A | TCCACATTTTTCATTCATCT | 47 | B | 152 |
| 1549879 | 23738 | 23757 | N/A | N/A | CTGCTTTATCACATTAACTT | 51 | B | 153 |
| 1549882 | 96204 | 96223 | N/A | N/A | GTTTATATTTTTAACACCCT | 131 | B | 154 |
| 1549900 | 114229 | 114248 | 5355 | 5374 | GTCTCTGTTTCCCCAACATC | 66 | B | 155 |
| 1549901 | 117464 | 117483 | 8590 | 8609 | ATGCCAGTTTTTCAAAGTCA | 15 | B | 156 |
| 1549909 | 72607 | 72626 | N/A | N/A | GTCATTCTCTCTCATTTCCA | 92 | B | 157 |
| 1549913 | 54769 | 54788 | N/A | N/A | GCTTTTCTTCCATTTCAAGT | 93 | B | 158 |
| 1549924 | 115944 | 115963 | 7070 | 7089 | GCCACACCAATATTTTGCAT | 66 | B | 159 |
| 1549931 | 82561 | 82580 | N/A | N/A | ATTCTCTCTTATCACCTCAT | 28 | B | 160 |
| 1549932 | 115179 | 115198 | 6305 | 6324 | TACTGCTTACTCTATCCCTA | 27 | B | 161 |
| 1549934 | 48128 | 48147 | N/A | N/A | ATGTGTCCTTTCCTTTCCCC | 49 | B | 162 |
| 1549939 | 53228 | 53247 | N/A | N/A | ATTCATTTATCTATCCAGTA | 144 | B | 163 |
| 1549940 | 115317 | 115336 | 6443 | 6462 | TGTTCACATTTTTAATCAAA | 56 | B | 164 |
| 1549945 | 73219 | 73238 | N/A | N/A | GAAATTCAAGCCCCATGATA | 227 | B | 165 |
| | 75631 | 75650 | | | | | | |
| 1549948 | 72468 | 72487 | N/A | N/A | AAAGAGGATCTTAAAAGCTA | 17 | B | 166 |
| | 75979 | 75998 | | | | | | |
| 1549977 | 73317 | 73336 | N/A | N/A | ATGGGATATCCACATCATCA | 12 | B | 167 |
| | 75729 | 75748 | | | | | | |
| 1549988 | 73211 | 73230 | N/A | N/A | AGCCCCATGATACCCCTAAT | 328 | B | 168 |
| | 75623 | 75642 | | | | | | |
| 1550004 | 73149 | 73168 | N/A | N/A | ACTTGTCAATCACTCTTTTT | 107 | B | 169 |
| | 75561 | 75580 | | | | | | |
| 1550006 | 73356 | 73375 | N/A | N/A | CCCAATCTCATATCAGGATT | 30 | B | 170 |
| | 75768 | 75787 | | | | | | |
| 1549513 | 43411 | 43430 | N/A | N/A | GCATTTCTTTTCTACCAGTA | 6 | C | 171 |
| 1549525 | 48667 | 48686 | N/A | N/A | TTGCCTTTTCTTTTTCTCAA | 29 | C | 172 |
| 1549533 | 114010 | 114029 | 5136 | 5155 | GTGGTTTCTTTCTCTTCTTC | 50 | C | 173 |
| 1549537 | 46230 | 46249 | N/A | N/A | CCCATTTTCTTCCTTCATCA | 37 | C | 174 |
| 1549540 | 117980 | 117999 | 9106 | 9125 | AGGTCATCTTGAATTGCCAA | 66 | C | 175 |
| 1549541 | 118295 | 118314 | 9421 | 9440 | TGTACTTGCATCCCTCTAAA | 64 | C | 176 |
| 1549544 | 21079 | 21098 | N/A | N/A | CATACTTCCTTATTTTTCTT | 39 | C | 177 |
| 1549547 | 112166 | 112185 | N/A | N/A | GCATCAGTCTATATATAACA | 62 | C | 178 |
| 1549552 | 93360 | 93379 | N/A | N/A | GCTACAATTTCAATAGATAT | 71 | C | 179 |
| 1549556 | 52221 | 52240 | N/A | N/A | GTTCACTGTTATCACTCCCA | 46 | C | 180 |
| 1549559 | 38646 | 38665 | N/A | N/A | ACTCATTATCTTCCTTTTCT | 46 | C | 181 |
| 1549560 | 38617 | 38636 | N/A | N/A | TTCTCCATATCACTTATCTT | 97 | C | 182 |
| 1549564 | 12312 | 12331 | N/A | N/A | TCCTTCTTTTTCAACCTCCT | 26 | C | 183 |
| 1549584 | 20160 | 20179 | N/A | N/A | CTTAACTTCTATCTTGTCTC | 50 | C | 184 |
| 1549585 | 78961 | 78980 | N/A | N/A | CTGCTTTATATTCTCTCTAC | 96 | C | 185 |
| 1549587 | 87648 | 87667 | N/A | N/A | GTATTGTTTTTTCTAATCCT | 40 | C | 186 |
| 1549588 | 29869 | 29888 | N/A | N/A | GCTCTTTTCTTTCATAGCAT | 35 | C | 187 |
| 1549596 | 76868 | 76887 | N/A | N/A | GCATAATTTTATCTAGCATA | 18 | C | 188 |
| 1549609 | 6716 | 6735 | 3930 | 3949 | CTCACTTTCTCCTCTGTCTT | 49 | C | 189 |
| 1549614 | 36674 | 36693 | N/A | N/A | GCCTATTTTCCTTTCTTCGA | 36 | C | 190 |
| 1549635 | 107970 | 107989 | N/A | N/A | GCATCTTTATTACTAGCGGT | 52 | C | 191 |
| 1549636 | 33582 | 33601 | N/A | N/A | CTTAGATTTTTTTCTTTATC | 122 | C | 192 |
| 1549637 | 106275 | 106294 | N/A | N/A | TTCCACATTTTTCATTCATC | 90 | C | 193 |
| 1549639 | 96731 | 96750 | N/A | N/A | AGTACTTTCTTATCCCCTTA | 50 | C | 194 |
| 1549644 | 44572 | 44591 | N/A | N/A | TCTATTATCTCTCTTGCACA | 49 | C | 195 |
| 1549650 | 7446 | 7465 | 3988 | 4007 | CTTGCTTGATTTCTTTTGAT | 76 | C | 196 |
| 1549662 | 1369 | 1388 | 1369 | 1388 | ACTCAGTTTTACCCCTTCAA | 33 | C | 197 |
| 1549667 | 40586 | 40605 | N/A | N/A | ACTTTTTGCCTCTCTCATAA | 86 | C | 198 |
| 1549677 | 114230 | 114249 | 5356 | 5375 | TGTCTCTGTTTCCCCAACAT | 26 | C | 199 |
| 1549680 | 70902 | 70921 | N/A | N/A | ATTCTATTTTCCCTTCTCAC | 94 | C | 200 |
| 1549683 | 82980 | 82999 | N/A | N/A | ATTTCTATCATTACTCCCAT | 52 | C | 201 |
| 1549686 | 63487 | 63506 | N/A | N/A | GTGCTTTGTTCATTTCCTAT | 97 | C | 202 |
| 1549693 | 118350 | 118369 | 9476 | 9495 | TACAACAATTTTATCTTCAT | 86 | C | 203 |
| 1549694 | 12327 | 12346 | N/A | N/A | CTTTCTTCTCCATTTTCCTT | 32 | C | 204 |
| 1549696 | 13041 | 13060 | N/A | N/A | GCTATTTTTTTTCAAAGCCT | 80 | C | 205 |
| 1549716 | 32171 | 32190 | N/A | N/A | TTGTTCATTTATACCACACA | 32 | C | 206 |
| 1549719 | 115679 | 115698 | 6805 | 6824 | CCTCTTTTGCATTCTAGTGC | 54 | C | 207 |
| 1549729 | 82564 | 82583 | N/A | N/A | TTCATTCTCTCTTATCACCT | 39 | C | 208 |
| 1549734 | 53934 | 53953 | N/A | N/A | CTTCTTTTTTTAACTGCTGA | 39 | C | 209 |
| 1549738 | 72609 | 72628 | N/A | N/A | CTGTCATTCTCTCTCATTTC | 72 | C | 210 |
| 1549746 | 95645 | 95664 | N/A | N/A | CCATCTGTTCTATCCGCTTT | 69 | C | 211 |
| 1549747 | 64957 | 64976 | N/A | N/A | ACACTTCTATATCTTCTGTA | 53 | C | 212 |
| 1549766 | 25685 | 25704 | N/A | N/A | GCTTTTTTTTGAATCTTCCT | 17 | C | 213 |
| 1549773 | 43528 | 43547 | N/A | N/A | CATCATTCTTATTTATTCAT | 47 | C | 214 |
| 1549777 | 25786 | 25805 | N/A | N/A | TTCCTATTTATTCTTCCATA | 74 | C | 215 |
| 1549784 | 80720 | 80739 | N/A | N/A | GCATCAGTTTTTCTTCTAAA | 8 | C | 216 |
| 1549786 | 25736 | 25755 | N/A | N/A | ATATATTCTCTTTTTCCCTC | 79 | C | 217 |
| 1549790 | 84412 | 84431 | N/A | N/A | AGTTGTTTTTTTCATATCCC | 23 | C | 218 |
| 1549796 | 18277 | 18296 | N/A | N/A | ACATTTATTTGATCCCATAT | 81 | C | 219 |
| 1549803 | 15925 | 15944 | N/A | N/A | ACTCTCATTCTCATTTTTTC | 61 | C | 220 |
| 1549812 | 114463 | 114482 | 5589 | 5608 | GCTCAATTTCACATCACTGA | 74 | C | 221 |
| 1549819 | 5398 | 5417 | N/A | N/A | CCCCACATTTTTCTCCTATA | 20 | C | 222 |
| 1549820 | 17981 | 18000 | N/A | N/A | CACTTCTTTTTCTATTTCTA | 35 | C | 223 |
| 1549822 | 8230 | 8249 | N/A | N/A | CTATCCATATTCTCTCACCA | 54 | C | 224 |
| 1549829 | 115181 | 115200 | 6307 | 6326 | TGTACTGCTTACTCTATCCC | 67 | C | 225 |
| 1549831 | 21617 | 21636 | N/A | N/A | GTGTATTGCCAAATTGCCCC | 27 | C | 226 |
| 1549835 | 23741 | 23760 | N/A | N/A | ACTCTGCTTTATCACATTAA | 24 | C | 227 |
| 1549855 | 4745 | 4764 | N/A | N/A | GTGTTTCTTCTTTTCTCCCT | 13 | C | 228 |
| 1549856 | 28043 | 28062 | N/A | N/A | GCTTTTGTTCTCCCCCTCCC | 32 | C | 229 |
| 1549861 | 12548 | 12567 | N/A | N/A | TTGCATTTTCTTCCTCCAAT | 12 | C | 230 |
| 1549863 | 11921 | 11940 | N/A | N/A | TGTTCCATTCCCTTTACCTT | 19 | C | 231 |
| 1549870 | 54873 | 54892 | N/A | N/A | CTGTGGTTTTTTTCTTGTCT | 33 | C | 232 |
| 1549872 | 116325 | 116344 | 7451 | 7470 | GTTCCCACTTTCCACAATCT | 28 | C | 233 |
| 1549874 | 115319 | 115338 | 6445 | 6464 | CTTGTTCACATTTTTAATCA | 23 | C | 234 |
| 1549891 | 117478 | 117497 | 8604 | 8623 | TCTTAAGCTCATTTATGCCA | 50 | C | 235 |
| 1549916 | 69476 | 69495 | N/A | N/A | GTACATTTTTTCCTTTGGAC | 17 | C | 236 |
| 1549919 | 59998 | 60017 | N/A | N/A | TATATTTCTAATATCACATT | 145 | C | 237 |
| 1549922 | 52784 | 52803 | N/A | N/A | TCATTTTTTTCTCACCTGCA | 57 | C | 238 |
| 1549926 | 56190 | 56209 | N/A | N/A | GCCTCATTAGTACTACATTC | 75 | C | 239 |
| 1549935 | 64264 | 64283 | N/A | N/A | CTTGCTTTATTACCTGCATA | 120 | C | 240 |
| 1549938 | 10817 | 10836 | N/A | N/A | CTTGTCTTTTTCATCTCTCT | 2 | C | 241 |
| 1549943 | 60699 | 60718 | N/A | N/A | TTTATTCCTTGAATTCTACT | 81 | C | 242 |
| 1549946 | 73213 | 73232 | N/A | N/A | CAAGCCCCATGATACCCCTA | 58 | C | 243 |
| | 75625 | 75644 | | | | | | |
| 1549951 | 72469 | 72488 | N/A | N/A | AAAAGAGGATCTTAAAAGCT | 102 | C | 244 |
| | 75980 | 75999 | | | | | | |
| 1549965 | 73357 | 73376 | N/A | N/A | CCCCAATCTCATATCAGGAT | 31 | C | 245 |
| | 75769 | 75788 | | | | | | |
| 1549985 | 73312 | 73331 | N/A | N/A | ATATCCACATCATCAAAAAT | 100 | C | 246 |
| | 75724 | 75743 | | | | | | |
| 1550005 | 73318 | 73337 | N/A | N/A | AATGGGATATCCACATCATC | 25 | C | 247 |
| | 75730 | 75749 | | | | | | |
| 1550010 | 73150 | 73169 | N/A | N/A | TACTTGTCAATCACTCTTTT | 61 | C | 248 |
| | 75562 | 75581 | | | | | | |
| 1549515 | 46231 | 46250 | N/A | N/A | ACCCATTTTCTTCCTTCATC | 47 | D | 249 |
| 1549517 | 21747 | 21766 | N/A | N/A | TCCGATGTTTTATCCTCATA | 2 | D | 250 |
| 1549518 | 5510 | 5529 | N/A | N/A | GCTGATTTCTTTTTCATCAA | 7 | D | 251 |
| 1549527 | 69709 | 69728 | N/A | N/A | ACTGTTTAATTTTTTTCATC | 111 | D | 252 |
| 1549549 | 25687 | 25706 | N/A | N/A | ACGCTTTTTTTTGAATCTTC | 78 | D | 253 |
| 1549550 | 29895 | 29914 | N/A | N/A | CCCATTTTACTCTTTCATAA | 65 | D | 254 |
| 1549551 | 59718 | 59737 | N/A | N/A | ATTCATTTTAAAATCCCCCA | 98 | D | 255 |
| 1549563 | 93856 | 93875 | N/A | N/A | CTTGACATTCATATCCAGTA | 71 | D | 256 |
| 1549575 | 118146 | 118165 | 9272 | 9291 | GCTGATTTCTAGCTCGAGCT | 83 | D | 257 |
| 1549576 | 77602 | 77621 | N/A | N/A | GTTTAGATTTATCATTTCCC | 43 | D | 258 |
| 1549578 | 52552 | 52571 | N/A | N/A | CTTAGCATTTTCTCAGCACT | 53 | D | 259 |
| 1549590 | 25787 | 25806 | N/A | N/A | TTTCCTATTTATTCTTCCAT | 67 | D | 260 |
| 1549593 | 38943 | 38962 | N/A | N/A | TCTACTACTTCCATCACACT | 92 | D | 261 |
| 1549599 | 95893 | 95912 | N/A | N/A | CCTTTTTTTCTTCCCCACTC | 69 | D | 262 |
| 1549602 | 16836 | 16855 | N/A | N/A | ATGTTCATTTTATTCCCTCC | 17 | D | 263 |
| 1549619 | 33728 | 33747 | N/A | N/A | ACTATTTTCTTTTTAAATCA | 146 | D | 264 |
| 1549625 | 12549 | 12568 | N/A | N/A | GTTGCATTTTCTTCCTCCAA | 23 | D | 265 |
| 1549627 | 70908 | 70927 | N/A | N/A | GTGCAGATTCTATTTTCCCT | 30 | D | 266 |
| 1549628 | 17984 | 18003 | N/A | N/A | GCACACTTCTTTTTCTATTT | 6 | D | 267 |
| 1549634 | 12281 | 12300 | N/A | N/A | TCACTCTTTTCTACGCCCTC | 62 | D | 268 |
| 1549641 | 115711 | 115730 | 6837 | 6856 | TGACTTATCTACCTAAACTT | 122 | D | 269 |
| 1549658 | 6717 | 6736 | 3931 | 3950 | GCTCACTTTCTCCTCTGTCT | 71 | D | 270 |
| 1549669 | 23833 | 23852 | N/A | N/A | TTCGATCTTCTTATCACCTT | 36 | D | 271 |
| 1549670 | 48669 | 48688 | N/A | N/A | ACTTGCCTTTTCTTTTTCTC | 47 | D | 272 |
| 1549674 | 117686 | 117705 | 8812 | 8831 | CTGGAATATTTCATTATCAA | 30 | D | 273 |
| 1549676 | 115185 | 115204 | 6311 | 6330 | ACTTTGTACTGCTTACTCTA | 59 | D | 274 |
| 1549690 | 32172 | 32191 | N/A | N/A | GTTGTTCATTTATACCACAC | 69 | D | 275 |
| 1549692 | 115320 | 115339 | 6446 | 6465 | TCTTGTTCACATTTTTAATC | 29 | D | 276 |
| 1549695 | 116331 | 116350 | 7457 | 7476 | ATTAATGTTCCCACTTTCCA | 84 | D | 277 |
| 1549699 | 12331 | 12350 | N/A | N/A | CTATCTTTCTTCTCCATTTT | 120 | D | 278 |
| 1549707 | 114258 | 114277 | 5384 | 5403 | AATACATAATACTTTTCACA | 71 | D | 279 |
| 1549717 | 87649 | 87668 | N/A | N/A | AGTATTGTTTTTTCTAATCC | 84 | D | 280 |
| 1549732 | 18279 | 18298 | N/A | N/A | ACACATTTATTTGATCCCAT | 24 | D | 281 |
| 1549741 | 25737 | 25756 | N/A | N/A | TATATATTCTCTTTTTCCCT | 101 | D | 282 |
| 1549745 | 78962 | 78981 | N/A | N/A | ACTGCTTTATATTCTCTCTA | 53 | D | 283 |
| 1549749 | 4746 | 4765 | N/A | N/A | TGTGTTTCTTCTTTTCTCCC | 19 | D | 284 |
| 1549756 | 43413 | 43432 | N/A | N/A | TTGCATTTCTTTTCTACCAG | 16 | D | 285 |
| 1549760 | 13364 | 13383 | N/A | N/A | GCATTGTTTCTCATTGCTTT | 107 | D | 286 |
| 1549767 | 85361 | 85380 | N/A | N/A | ACTACCAGTATCCTCCATTC | 87 | D | 287 |
| 1549768 | 60704 | 60723 | N/A | N/A | GCTTGTTTATTCCTTGAATT | 45 | D | 288 |
| 1549776 | 1998 | 2017 | 1998 | 2017 | ACGCAGATTTCCATTGAGCT | 40 | D | 289 |
| 1549778 | 118458 | 118477 | 9584 | 9603 | CTGCTTTATCATCTTCATAA | 33 | D | 290 |
| 1549788 | 28085 | 28104 | N/A | N/A | ACACATTTCACATTCAGGTT | 12 | D | 291 |
| 1549789 | 114011 | 114030 | 5137 | 5156 | TGTGGTTTCTTTCTCTTCTT | 40 | D | 292 |
| 1549792 | 43529 | 43548 | N/A | N/A | ACATCATTCTTATTTATTCA | 59 | D | 293 |
| 1549806 | 97116 | 97135 | N/A | N/A | GATCATGTATCTTTACACTC | 95 | D | 294 |
| 1549807 | 114609 | 114628 | 5735 | 5754 | GCCTTTTGCCATCACCACAC | 69 | D | 295 |
| 1549809 | 55222 | 55241 | N/A | N/A | ATTCTTTTTCTAATTCGAAT | 107 | D | 296 |
| 1549811 | 20192 | 20211 | N/A | N/A | TCTGCTTTTCTCATTGACTT | 30 | D | 297 |
| 1549816 | 64669 | 64688 | N/A | N/A | TCATCTTTTTCATAGGCATC | 33 | D | 298 |
| 1549817 | 82565 | 82584 | N/A | N/A | TTTCATTCTCTCTTATCACC | 127 | D | 299 |
| 1549818 | 106548 | 106567 | N/A | N/A | CTACTTGTCTCTTTCTCACT | 159 | D | 300 |
| 1549825 | 59999 | 60018 | N/A | N/A | GTATATTTCTAATATCACAT | 183 | D | 301 |
| 1549845 | 12315 | 12334 | N/A | N/A | TTTTCCTTCTTTTTCAACCT | 69 | D | 302 |
| 1549848 | 113900 | 113919 | 5026 | 5045 | ATGCATGACTTTCTCGCTAT | 85 | D | 303 |
| 1549859 | 7460 | 7479 | 4002 | 4021 | CTGATTTTTTTCTTCTTGCT | 17 | D | 304 |
| 1549865 | 8975 | 8994 | N/A | N/A | CCATCATCCATATACCACTC | 47 | D | 305 |
| 1549878 | 82447 | 82466 | N/A | N/A | ATGCTTGTCTCTCCCTTTCA | 51 | D | 306 |
| 1549883 | 108229 | 108248 | N/A | N/A | TTGTCTTTATTCCTTCCTGC | 57 | D | 307 |
| 1549886 | 21083 | 21102 | N/A | N/A | GCTTCATACTTCCTTATTTT | 33 | D | 308 |
| 1549888 | 83231 | 83250 | N/A | N/A | AATGCATTTTCTCTCCCCAT | 32 | D | 309 |
| 1549889 | 74722 | 74741 | N/A | N/A | CAGTCTTTTCATATTGCTTC | 21 | D | 310 |
| 1549894 | 118314 | 118333 | 9440 | 9459 | ACTGCTTAATGAGACATACT | 64 | D | 311 |
| 1549897 | 53937 | 53956 | N/A | N/A | CTGCTTCTTTTTTTAACTGC | 50 | D | 312 |
| 1549899 | 52785 | 52804 | N/A | N/A | GTCATTTTTTTCTCACCTGC | 20 | D | 313 |
| 1549907 | 63654 | 63673 | N/A | N/A | CTTCCATTTCTCTCATGCAT | 92 | D | 314 |
| 1549914 | 65069 | 65088 | N/A | N/A | GTTATTGTTTAATACCATCA | 23 | D | 315 |
| 1549925 | 36678 | 36697 | N/A | N/A | GCTAGCCTATTTTCCTTTCT | 71 | D | 316 |
| 1549927 | 38624 | 38643 | N/A | N/A | CTTATTTTTCTCCATATCAC | 74 | D | 317 |
| 1549928 | 40644 | 40663 | N/A | N/A | TCTCTTCATTTCAACACATT | 131 | D | 318 |
| 1549929 | 45391 | 45410 | N/A | N/A | ATTTCTTTCAACATTTCCCA | 80 | D | 319 |
| 1549941 | 10818 | 10837 | N/A | N/A | TCTTGTCTTTTTCATCTCTC | 6 | D | 320 |
| 1549952 | 73319 | 73338 | N/A | N/A | TAATGGGATATCCACATCAT | 91 | D | 321 |
| | 75731 | 75750 | | | | | | |
| 1549964 | 73358 | 73377 | N/A | N/A | ACCCCAATCTCATATCAGGA | 53 | D | 322 |
| | 75770 | 75789 | | | | | | |
| 1549975 | 73151 | 73170 | N/A | N/A | CTACTTGTCAATCACTCTTT | 86 | D | 323 |
| | 75563 | 75582 | | | | | | |
| 1549995 | 73313 | 73332 | N/A | N/A | GATATCCACATCATCAAAAA | 37 | D | 324 |
| | 75725 | 75744 | | | | | | |
| 1550000 | 73214 | 73233 | N/A | N/A | TCAAGCCCCATGATACCCCT | 50 | D | 325 |
| | 75626 | 75645 | | | | | | |
| 1550008 | 72479 | 72498 | N/A | N/A | AGATAGCTAAAAAAGAGGAT | 100 | D | 326 |
| | 75990 | 76009 | | | | | | |
| 1549511 | 52787 | 52806 | N/A | N/A | GTGTCATTTTTTTCTCACCT | 34 | E | 327 |
| 1549512 | 18969 | 18988 | N/A | N/A | GTGCATCTCCTATTCATCCC | 13 | E | 328 |
| 1549519 | 78891 | 78910 | N/A | N/A | GTCTGTTTTATCTATCCACT | 9 | E | 329 |
| 1549523 | 4747 | 4766 | N/A | N/A | CTGTGTTTCTTCTTTTCTCC | 15 | E | 330 |
| 1549524 | 115191 | 115210 | 6317 | 6336 | ATATACACTTTGTACTGCTT | 35 | E | 331 |
| 1549530 | 43414 | 43433 | N/A | N/A | ATTGCATTTCTTTTCTACCA | 55 | E | 332 |
| 1549534 | 12550 | 12569 | N/A | N/A | AGTTGCATTTTCTTCCTCCA | 8 | E | 333 |
| 1549536 | 115331 | 115350 | 6457 | 6476 | TTTTAGTATTTTCTTGTTCA | 40 | E | 334 |
| 1549539 | 15628 | 15647 | N/A | N/A | CTGTCATATTTTATTTCATT | 21 | E | 335 |
| 1549545 | 12332 | 12351 | N/A | N/A | ACTATCTTTCTTCTCCATTT | 104 | E | 336 |
| 1549548 | 36733 | 36752 | N/A | N/A | ACTTGGACTTTTATCCTTTA | 53 | E | 337 |
| 1549554 | 5751 | 5770 | N/A | N/A | ACCAATTATTTAATTATACT | 72 | E | 338 |
| 1549555 | 12316 | 12335 | N/A | N/A | ATTTTCCTTCTTTTTCAACC | 75 | E | 339 |
| 1549561 | 9742 | 9761 | N/A | N/A | CTCTCACTTTCTATTGCTGA | 45 | E | 340 |
| 1549566 | 32756 | 32775 | N/A | N/A | GCACTCATTTTTGTAAACTC | 5 | E | 341 |
| 1549567 | 24150 | 24169 | N/A | N/A | GTGTATCTATATCTCCCTAC | 15 | E | 342 |
| 1549570 | 4111 | 4130 | N/A | N/A | TCTCTGTTTTTCCTACCATA | 53 | E | 343 |
| 1549572 | 59762 | 59781 | N/A | N/A | GCTTTTCTCAATTTTCCAAA | 15 | E | 344 |
| 1549580 | 75143 | 75162 | N/A | N/A | TTTTAGTGATTATTTTTCCA | 66 | E | 345 |
| 1549592 | 93859 | 93878 | N/A | N/A | TGTCTTGACATTCATATCCA | 72 | E | 346 |
| 1549597 | 107051 | 107070 | N/A | N/A | GCACTATTATCAATCCCATC | 87 | E | 347 |
| 1549600 | 25690 | 25709 | N/A | N/A | CCTACGCTTTTTTTTGAATC | 133 | E | 348 |
| 1549606 | 54367 | 54386 | N/A | N/A | GTCATTTTGCATTACTTTTA | 21 | E | 349 |
| 1549615 | 52594 | 52613 | N/A | N/A | CCTCATTTCTAATATATCTC | 158 | E | 350 |
| 1549616 | 92012 | 92031 | N/A | N/A | GTGCCTTTTTTCCCTTCCAT | 32 | E | 351 |
| 1549621 | 29896 | 29915 | N/A | N/A | CCCCATTTTACTCTTTCATA | 54 | E | 352 |
| 1549622 | 60000 | 60019 | N/A | N/A | TGTATATTTCTAATATCACA | 85 | E | 353 |
| 1549623 | 109643 | 109662 | N/A | N/A | GTGTCTTTAATTTAAACATA | 98 | E | 354 |
| 1549633 | 79186 | 79205 | N/A | N/A | CCTATTTTACACACCATCCT | 174 | E | 355 |
| 1549638 | 45396 | 45415 | N/A | N/A | CTTGTATTTCTTTCAACATT | 53 | E | 356 |
| 1549645 | 70084 | 70103 | N/A | N/A | CTTATTATCCAATCTACACA | 105 | E | 357 |
| 1549648 | 113937 | 113956 | 5063 | 5082 | CTTTGTTGCGACCTTCCTTC | 114 | E | 358 |
| 1549649 | 118337 | 118356 | 9463 | 9482 | TCTTCATATAATCAGCAACA | 75 | E | 359 |
| 1549656 | 38625 | 38644 | N/A | N/A | CCTTATTTTTCTCCATATCA | 95 | E | 360 |
| 1549657 | 114012 | 114031 | 5138 | 5157 | GTGTGGTTTCTTTCTCTTCT | 54 | E | 361 |
| 1549663 | 118459 | 118478 | 9585 | 9604 | GCTGCTTTATCATCTTCATA | 73 | E | 362 |
| 1549668 | 46232 | 46251 | N/A | N/A | GACCCATTTTCTTCCTTCAT | 35 | E | 363 |
| 1549689 | 21089 | 21108 | N/A | N/A | ATGTATGCTTCATACTTCCT | 79 | E | 364 |
| 1549710 | 12282 | 12301 | N/A | N/A | TTCACTCTTTTCTACGCCCT | 33 | E | 365 |
| 1549711 | 7461 | 7480 | 4003 | 4022 | ACTGATTTTTTTCTTCTTGC | 31 | E | 366 |
| 1549714 | 84408 | 84427 | N/A | N/A | GTTTTTTTCATATCCCTAAT | 35 | E | 367 |
| 1549722 | 20323 | 20342 | N/A | N/A | ATGATTTTATTATTTGAGTT | 76 | E | 368 |
| 1549739 | 21748 | 21767 | N/A | N/A | TTCCGATGTTTTATCCTCAT | 7 | E | 369 |
| 1549752 | 18030 | 18049 | N/A | N/A | CTTTCTTTCCATTTCAGAAA | 128 | E | 370 |
| 1549753 | 34364 | 34383 | N/A | N/A | GTCACTTTTCCATACTAATA | 30 | E | 371 |
| 1549759 | 95894 | 95913 | N/A | N/A | GCCTTTTTTTCTTCCCCACT | 26 | E | 372 |
| 1549770 | 82566 | 82585 | N/A | N/A | ATTTCATTCTCTCTTATCAC | 89 | E | 373 |
| 1549774 | 118198 | 118217 | 9324 | 9343 | GCCTATTGCAACTAATACCT | 55 | E | 374 |
| 1549779 | 55252 | 55271 | N/A | N/A | CTTTCTTATTATTTAGTATA | 77 | E | 375 |
| 1549787 | 38950 | 38969 | N/A | N/A | AGTACTTTCTACTACTTCCA | 56 | E | 376 |
| 1549794 | 115712 | 115731 | 6838 | 6857 | CTGACTTATCTACCTAAACT | 79 | E | 377 |
| 1549795 | 117886 | 117905 | 9012 | 9031 | TTGTGGGTTATTCTTTACCA | 22 | E | 378 |
| 1549800 | 43531 | 43550 | N/A | N/A | GCACATCATTCTTATTTATT | 9 | E | 379 |
| 1549805 | 28829 | 28848 | N/A | N/A | GCTTTTTTCTCTGCTACTCA | 13 | E | 380 |
| 1549808 | 6718 | 6737 | 3932 | 3951 | GGCTCACTTTCTCCTCTGTC | 36 | E | 381 |
| 1549813 | 85694 | 85713 | N/A | N/A | CTCTCATTTTACATTTTTAA | 50 | E | 382 |
| 1549815 | 48821 | 48840 | N/A | N/A | GCTACATTTTCTCAGATCTC | 68 | E | 383 |
| 1549823 | 76482 | 76501 | N/A | N/A | TGTTTTTTTCCTCTTCATTT | 44 | E | 384 |
| 1549826 | 63655 | 63674 | N/A | N/A | TCTTCCATTTCTCTCATGCA | 63 | E | 385 |
| 1549830 | 40647 | 40666 | N/A | N/A | TAGTCTCTTCATTTCAACAC | 54 | E | 386 |
| 1549832 | 97202 | 97221 | N/A | N/A | ATGCATTTTCATTCACAAAT | 74 | E | 387 |
| 1549837 | 17353 | 17372 | N/A | N/A | CTGTCCATTCTTCTCACTTA | 79 | E | 388 |
| 1549844 | 114265 | 114284 | 5391 | 5410 | AACACTTAATACATAATACT | 81 | E | 389 |
| 1549849 | 25738 | 25757 | N/A | N/A | ATATATATTCTCTTTTTCCC | 86 | E | 390 |
| 1549866 | 10821 | 10840 | N/A | N/A | ATTTCTTGTCTTTTTCATCT | 9 | E | 391 |
| 1549881 | 67873 | 67892 | N/A | N/A | ACTTTTCTCTTCCTATAAAA | 68 | E | 392 |
| 1549885 | 64799 | 64818 | N/A | N/A | CTTTGTCTTCACTTCTCAAA | 112 | E | 393 |
| 1549892 | 60993 | 61012 | N/A | N/A | GGTTATTTTTTTCTTTCTAA | 32 | E | 394 |
| 1549902 | 114701 | 114720 | 5827 | 5846 | GCTCATTCATTTGCTGTCTC | 76 | E | 395 |
| 1549903 | 25788 | 25807 | N/A | N/A | ATTTCCTATTTATTCTTCCA | 52 | E | 396 |
| 1549933 | 70964 | 70983 | N/A | N/A | ACTAGTTTTTTTCTCCTCAA | 34 | E | 397 |
| 1549936 | 116789 | 116808 | 7915 | 7934 | CTTGTAGCTTTTCACCAGAC | 73 | E | 398 |
| 1549942 | 82505 | 82524 | N/A | N/A | CTGATTTTGATCCTCACTAT | 90 | E | 399 |
| 1549947 | 73215 | 73234 | N/A | N/A | TTCAAGCCCCATGATACCCC | 92 | E | 400 |
| | 75627 | 75646 | | | | | | |
| 1549966 | 73153 | 73172 | N/A | N/A | CTCTACTTGTCAATCACTCT | 43 | E | 401 |
| | 75565 | 75584 | | | | | | |
| 1549969 | 73361 | 73380 | N/A | N/A | TAAACCCCAATCTCATATCA | 97 | E | 402 |
| | 75773 | 75792 | | | | | | |
| 1549984 | 73344 | 73363 | N/A | N/A | TCAGGATTACATATTTAAGT | 35 | E | 403 |
| | 75756 | 75775 | | | | | | |
| 1549994 | 73314 | 73333 | N/A | N/A | GGATATCCACATCATCAAAA | 70 | E | 404 |
| | 75726 | 75745 | | | | | | |
| 1549521 | 43415 | 43434 | N/A | N/A | AATTGCATTTCTTTTCTACC | 54 | F | 405 |
| 1549522 | 61905 | 61924 | N/A | N/A | CACATTTTACATTTAACACA | 114 | F | 406 |
| 1549528 | 84409 | 84428 | N/A | N/A | TGTTTTTTTCATATCCCTAA | 28 | F | 407 |
| 1549529 | 25883 | 25902 | N/A | N/A | CTCATTTTCCATCTATGAAA | 61 | F | 408 |
| 1549531 | 10103 | 10122 | N/A | N/A | GCATCTTTCACCTCTATTGT | 12 | F | 409 |
| 1549565 | 78892 | 78911 | N/A | N/A | AGTCTGTTTTATCTATCCAC | 47 | F | 410 |
| 1549568 | 5888 | 5907 | N/A | N/A | GTTGATTTTCTATTCTAATC | 26 | F | 411 |
| 1549571 | 114741 | 114760 | 5867 | 5886 | GTGAGTATTCTCCAAGTACT | 72 | F | 412 |
| 1549573 | 21234 | 21253 | N/A | N/A | GTTCATTTTACATTTTTTAT | 44 | F | 413 |
| 1549574 | 64800 | 64819 | N/A | N/A | GCTTTGTCTTCACTTCTCAA | 35 | F | 414 |
| 1549579 | 49307 | 49326 | N/A | N/A | CTTCTCATTTTATTTGGGAA | 101 | F | 415 |
| 1549581 | 12319 | 12338 | N/A | N/A | TCCATTTTCCTTCTTTTTCA | 27 | F | 416 |
| 1549583 | 45397 | 45416 | N/A | N/A | ACTTGTATTTCTTTCAACAT | 78 | F | 417 |
| 1549595 | 36818 | 36837 | N/A | N/A | CTTCAGTTTTTAACCTCTCC | 58 | F | 418 |
| 1549598 | 118239 | 118258 | 9365 | 9384 | TCATCAGGCTCATTCCCCTC | 69 | F | 419 |
| 1549603 | 92926 | 92945 | N/A | N/A | GCTTCATTCTGAATTTAATC | 51 | F | 420 |
| 1549607 | 115536 | 115555 | 6662 | 6681 | ACATATTTCTTTAGTTTATT | 74 | F | 421 |
| 1549608 | 76483 | 76502 | N/A | N/A | TTGTTTTTTTCCTCTTCATT | 41 | F | 422 |
| 1549624 | 40903 | 40922 | N/A | N/A | GCATCTGTTTTTTAATGATT | 55 | F | 423 |
| 1549630 | 60001 | 60020 | N/A | N/A | TTGTATATTTCTAATATCAC | 89 | F | 424 |
| 1549642 | 34366 | 34385 | N/A | N/A | CTGTCACTTTTCCATACTAA | 36 | F | 425 |
| 1549646 | 118460 | 118479 | 9586 | 9605 | AGCTGCTTTATCATCTTCAT | 103 | F | 426 |
| 1549661 | 39475 | 39494 | N/A | N/A | GCATTTTTTCCTATAATCTT | 16 | F | 427 |
| 1549666 | 114003 | 114022 | 5129 | 5148 | CTTTCTCTTCTTCCTGGAGA | 78 | F | 428 |
| 1549671 | 114341 | 114360 | 5467 | 5486 | GCTTTTTTAAATGTAATCCT | 64 | F | 429 |
| 1549673 | 32841 | 32860 | N/A | N/A | CGCACATAATTCTTCATCTT | 54 | F | 430 |
| 1549678 | 115853 | 115872 | 6979 | 6998 | TGTTCTCCCCTACCTAACCC | 72 | F | 431 |
| 1549681 | 52714 | 52733 | N/A | N/A | ACTATTTTCATCACATCACT | 77 | F | 432 |
| 1549685 | 47269 | 47288 | N/A | N/A | ACTCTTGATTTCCTAATCTA | 110 | F | 433 |
| 1549697 | 70250 | 70269 | N/A | N/A | TCTCATTATTGATTATGCCA | 13 | F | 434 |
| 1549698 | 7468 | 7487 | 4010 | 4029 | CATTCTTACTGATTTTTTTC | 52 | F | 435 |
| 1549701 | 72415 | 72434 | N/A | N/A | CTGGATATACTAACCACCCC | 89 | F | 436 |
| 1549702 | 21806 | 21825 | N/A | N/A | GCATATGTATATATCATAAT | 52 | F | 437 |
| 1549703 | 95896 | 95915 | N/A | N/A | TTGCCTTTTTTTCTTCCCCA | 56 | F | 438 |
| 1549709 | 12334 | 12353 | N/A | N/A | CTACTATCTTTCTTCTCCAT | 58 | F | 439 |
| 1549712 | 4748 | 4767 | N/A | N/A | ACTGTGTTTCTTCTTTTCTC | 12 | F | 440 |
| 1549713 | 80007 | 80026 | N/A | N/A | CCTCTTTTTCCTCTTTTCCA | 25 | F | 441 |
| 1549715 | 68235 | 68254 | 4388 | 4407 | CCTCATGTCCACTATCCTTC | 86 | F | 442 |
| 1549718 | 97754 | 97773 | N/A | N/A | TCTTTTTCCATTTGTCCGCT | 24 | F | 443 |
| 1549726 | 94071 | 94090 | N/A | N/A | CCTAGCATTTCTCTTTTTCA | 61 | F | 444 |
| 1549731 | 115315 | 115334 | 6441 | 6460 | TTCACATTTTTAATCAAAAA | 137 | F | 445 |
| 1549748 | 18031 | 18050 | N/A | N/A | GCTTTCTTTCCATTTCAGAA | 36 | F | 446 |
| 1549751 | 43670 | 43689 | N/A | N/A | GCTGCTGTTTCTATTTTTAT | 40 | F | 447 |
| 1549757 | 116938 | 116957 | 8064 | 8083 | GTCACACTTCAACACCAACT | 40 | F | 448 |
| 1549761 | 29227 | 29246 | N/A | N/A | TTTGATCTATTTCTGACCTT | 69 | F | 449 |
| 1549769 | 82506 | 82525 | N/A | N/A | TCTGATTTTGATCCTCACTA | 72 | F | 450 |
| 1549780 | 54744 | 54763 | N/A | N/A | GCTTTTACTCTACTGTGTTC | 88 | F | 451 |
| 1549791 | 25732 | 25751 | N/A | N/A | ATTCTCTTTTTCCCTCCCTT | 35 | F | 452 |
| 1549793 | 117937 | 117956 | 9063 | 9082 | TCATCAGTTTTCCCTAATGA | 66 | F | 453 |
| 1549797 | 63665 | 63684 | N/A | N/A | GCTAAGATTTTCTTCCATTT | 15 | F | 454 |
| 1549798 | 18970 | 18989 | N/A | N/A | CGTGCATCTCCTATTCATCC | 11 | F | 455 |
| 1549801 | 24152 | 24171 | N/A | N/A | TTGTGTATCTATATCTCCCT | 30 | F | 456 |
| 1549802 | 12283 | 12302 | N/A | N/A | CTTCACTCTTTTCTACGCCC | 28 | F | 457 |
| 1549836 | 30256 | 30275 | N/A | N/A | GCTTCTTTCTTTACTTTGAA | 13 | F | 458 |
| 1549842 | 15629 | 15648 | N/A | N/A | GCTGTCATATTTTATTTCAT | 11 | F | 459 |
| 1549847 | 52788 | 52807 | N/A | N/A | TGTGTCATTTTTTTCTCACC | 70 | F | 460 |
| 1549850 | 107289 | 107308 | N/A | N/A | ACTATTTTATCATAAATACT | 134 | F | 461 |
| 1549854 | 114132 | 114151 | 5258 | 5277 | GTCACAGAATGATAATCACC | 67 | F | 462 |
| 1549857 | 82572 | 82591 | N/A | N/A | TATCTTATTTCATTCTCTCT | 110 | F | 463 |
| 1549858 | 4112 | 4131 | N/A | N/A | CTCTCTGTTTTTCCTACCAT | 26 | F | 464 |
| 1549869 | 59764 | 59783 | N/A | N/A | ATGCTTTTCTCAATTTTCCA | 44 | F | 465 |
| 1549875 | 10888 | 10907 | N/A | N/A | ATTAGCATTTATTACTCTAT | 17 | F | 466 |
| 1549877 | 38626 | 38645 | N/A | N/A | GCCTTATTTTTCTCCATATC | 56 | F | 467 |
| 1549890 | 25763 | 25782 | N/A | N/A | TTTCATGTATATATAAACCA | 77 | F | 468 |
| 1549893 | 13012 | 13031 | N/A | N/A | TTTATTTTCATTATTTCCAC | 63 | F | 469 |
| 1549898 | 6719 | 6738 | 3933 | 3952 | AGGCTCACTTTCTCCTCTGT | 36 | F | 470 |
| 1549904 | 20420 | 20439 | N/A | N/A | CTGGTATTTTTCTTTGTGCT | 8 | F | 471 |
| 1549905 | 85957 | 85976 | N/A | N/A | CTTGTTTGATTTTCATCCTA | 67 | F | 472 |
| 1549906 | 118341 | 118360 | 9467 | 9486 | TTTATCTTCATATAATCAGC | 41 | F | 473 |
| 1549917 | 110199 | 110218 | N/A | N/A | GCCACTTTATATATGAAATA | 53 | F | 474 |
| 1549920 | 17751 | 17770 | N/A | N/A | CCACTGTGTTCTCTCCCCTA | 32 | F | 475 |
| 1549921 | 55257 | 55276 | N/A | N/A | AGTCACTTTCTTATTATTTA | 60 | F | 476 |
| 1549949 | 73144 | 73163 | N/A | N/A | TCAATCACTCTTTTTAGAGA | 63 | F | 477 |
| | 75556 | 75575 | | | | | | |
| 1549953 | 73315 | 73334 | N/A | N/A | GGGATATCCACATCATCAAA | 98 | F | 478 |
| | 75727 | 75746 | | | | | | |
| 1549968 | 73217 | 73236 | N/A | N/A | AATTCAAGCCCCATGATACC | 120 | F | 479 |
| | 75629 | 75648 | | | | | | |
| 1549971 | 73209 | 73228 | N/A | N/A | CCCCATGATACCCCTAATCA | 114 | F | 480 |
| | 75621 | 75640 | | | | | | |
| 1549986 | 73362 | 73381 | N/A | N/A | ATAAACCCCAATCTCATATC | 111 | F | 481 |
| | 75774 | 75793 | | | | | | |
| 1549998 | 73347 | 73366 | N/A | N/A | ATATCAGGATTACATATTTA | 160 | F | 482 |
| | 75759 | 75778 | | | | | | |

### Example 2: Effect of Modified Oligonucleotides on Human PCDH19 In Vitro, Multiple Doses

[0457] SHSY5Y cells, plated at a density of 10,000 cells/well, were differentiated in Neurobasal media supplemented with B27 (ThermoFisher), penicillin/streptomycin (ThermoFisher), and 10 μM retinoic acid (Sigma) for 10 days. Differentiated SH-SY5Y cells were treated with modified oligonucleotides at concentrations indicated in the tables below by free uptake. After a treatment period of approximately 5 days, total RNA was isolated from the cells and PCDH19 RNA levels were measured by quantitative real-time RT-PCR using human PCDH19 primer-probe set RTS53390 (described herein above) was used to measure RNA levels. PCDH19 RNA levels were normalized to total RNA content, as measured by GAPDH. Human GAPDH was measured using the human primer-probe set RTS104 (forward sequence GAAGGTGAAGGTCGGAGTC, designated herein as SEQ ID NO: 6; reverse sequence GAAGATGGTGATGGGATTTC, designated herein as SEQ ID NO: 7; probe sequence CAAGCTTCCCGTTCTCAGCC, designated herein as SEQ ID NO: 8). Reduction of PCDH19 RNA is presented in the tables below as percent PCDH19 RNA, relative to untreated control cells (% UTC). “N.C.” refers to values that were not calculated.

[0458] The half maximal inhibitory concentration (IC₅₀) of each modified oligonucleotide was calculated using a linear regression on a log/linear plot of the data in Excel and is also presented in the table below.

TABLE 2
Dose-dependent reduction of human PCDH19 RNA in differentiated
SH-SY5Y cells by modified oligonucleotides

| | PCDH19 RNA (% UTC) RTS53390 | | | | |
|---|---|---|---|---|---|
| Compound No. | 240 nM | 1200 nM | 6000 nM | 30000 nM | IC₅₀ (μM) |
| 1549513 | 41 | 12 | 6 | 3 | <0.24 |
| 1549558 | 42 | 16 | 9 | 1 | <0.24 |
| 1549562 | 64 | 34 | 13 | 5 | 0.50 |
| 1549589 | 23 | 12 | 4 | 4 | <0.24 |
| 1549605 | 68 | 54 | 32 | 27 | 1.44 |
| 1549626 | 75 | 70 | 60 | 19 | 4.73 |
| 1549697 | 37 | 16 | 7 | 5 | <0.24 |
| 1549712 | 38 | 22 | 11 | 5 | <0.24 |
| 1549784 | 22 | 7 | 4 | 3 | <0.24 |
| 1549798 | 35 | 21 | 6 | 5 | <0.24 |
| 1549841 | 59 | 31 | 17 | 5 | 0.36 |
| 1549842 | 33 | 11 | 5 | 3 | <0.24 |
| 1549855 | 23 | 8 | 5 | 5 | <0.24 |
| 1549887 | 69 | 32 | 10 | 5 | 0.56 |
| 1549904 | 73 | 28 | 13 | 5 | 0.60 |
| 1549911 | 47 | 26 | 16 | 4 | <0.24 |
| 1549915 | 57 | 31 | 39 | 13 | 0.36 |
| 1549938 | 23 | 9 | 4 | 3 | <0.24 |
| 1549980 | 81 | 52 | 29 | 10 | 1.65 |

TABLE 3
Dose-dependent reduction of human PCDH19 RNA in differentiated
SH-SY5Y cells by modified oligonucleotides

| | PCDH19 RNA (% UTC) RTS53390 | | | | |
|---|---|---|---|---|---|
| Compound No. | 240 nM | 1200 nM | 6000 nM | 30000 nM | IC₅₀ (μM) |
| 1549517 | 35 | 13 | 11 | 4 | <0.24 |
| 1549518 | 28 | 14 | 8 | 5 | <0.24 |
| 1549519 | 42 | 19 | 9 | 6 | <0.24 |
| 1549520 | 56 | 39 | 25 | 6 | 0.44 |
| 1549526 | 43 | 22 | 7 | 8 | <0.24 |
| 1549534 | 35 | 15 | 6 | 2 | <0.24 |
| 1549566 | 26 | 15 | 4 | 2 | <0.24 |
| 1549572 | 38 | 15 | 6 | 3 | <0.24 |
| 1549613 | 52 | 25 | 10 | N.C | 0.24 |
| 1549628 | 23 | 9 | 4 | 5 | <0.24 |
| 1549654 | 69 | 35 | 19 | 7 | 0.67 |
| 1549700 | 50 | 33 | 27 | N.C | <0.24 |
| 1549737 | 62 | 36 | 20 | 7 | 0.51 |
| 1549739 | 32 | 11 | 6 | 4 | <0.24 |
| 1549800 | 32 | 13 | 7 | 4 | <0.24 |
| 1549804 | 51 | 31 | 14 | 3 | 0.22 |
| 1549866 | 33 | 8 | 7 | 4 | <0.24 |
| 1549887 | 45 | 19 | 9 | 9 | <0.24 |
| 1549941 | 33 | 14 | 8 | 7 | <0.24 |

### Example 3: Effect of 3-10-3 cEt Modified Oligonucleotides with Uniform Phosphorothioate Internucleoside Linkages Complementary to a Human PCDH19 RNA In Vitro, Single Dose

[0459] Modified oligonucleotides complementary to human PCDH19 nucleic acid were designed and tested for their single dose effects on PCDH19 RNA in vitro. The modified oligonucleotides were tested in a series of experiments that had the same culture conditions.

[0460] The modified oligonucleotides in the table below are 3-10-3 cEt modified oligonucleotides with uniform phosphorothioate internucleoside linkages. The modified oligonucleotides are 16 nucleosides in length. The sugar motif for the modified oligonucleotides is (from 5′ to 3′): kkkddddddddddkkk; wherein each “d” represents a 2′-β-D-deoxyribosyl sugar moiety, and each “k” represents a cEt sugar moiety. The internucleoside linkage motif for the modified oligonucleotides is (from 5′ to 3′): sssssssssssssss; wherein each “s” represents a phosphorothioate internucleoside linkage. Each cytosine residue is a 5-methylcytosine.

[0461] “Start site” indicates the 5′-most nucleoside to which the modified oligonucleotide is complementary in the target nucleic acid sequence. “Stop site” indicates the 3′-most nucleoside to which the modified oligonucleotide is complementary in the target nucleic acid sequence. Each modified oligonucleotide listed in the table below is 100% complementary to SEQ ID NO: 1 (described herein above), to SEQ ID NO: 2 (described herein above), or to both. “N/A” indicates that the modified oligonucleotide is not 100% complementary to that particular target nucleic acid sequence.

[0462] SHSY5Y cells, plated at a density of 10,000 cells/well, were differentiated in Neurobasal media supplemented with B27 (ThermoFisher), penicillin/streptomycin (ThermoFisher), and 10 μM retinoic acid (Sigma) for 10 days. Differentiated SH-SY5Y cells were treated with modified oligonucleotide at a concentration of 6,000 nM by free uptake. After a treatment period of approximately 5 days, total RNA was isolated from the cells and PCDH19 RNA levels were measured by quantitative real-time RT-PCR using human primer-probe set RTS53390 (described herein above). PCDH19 RNA levels were normalized to total RNA content, as measured by RIBOGREEN®. Reduction of PCDH19 RNA is presented in the table below as percent PCDH19 RNA relative to the amount in untreated control cells (% UTC).

[0463] Each separate experiment described in this example is identified by an Assay Identification letter in the table column labeled “AID”.

TABLE 4
Reduction of PCDH19 RNA by 3-10-3 cEt modified oligonucleotides with uniform phosphorothioate
internucleoside linkages at a concentration of 6,000 nM in differentiated SH-SY5Y cells

| | SEQ ID | SEQ ID | SEQ ID | SEQ ID | | | | |
|---|---|---|---|---|---|---|---|---|
| | NO: 1 | NO: 1 | NO: 2 | NO: 2 | | | | SEQ |
| Compound | Start | Stop | Start | Stop | | PCDH19 | | ID |
| No. | Site | Site | Site | Site | Sequence (5′ to 3′) | (% UTC) | AID | NO |
| 1626338 | 31494 | 31509 | N/A | N/A | GACTATACTAAGCTGC | 46 | G | 483 |
| 1626339 | 80695 | 80710 | N/A | N/A | AGATATTTACACGCAG | 11 | G | 484 |
| 1626340 | 82939 | 82954 | N/A | N/A | CGAACAAATAAGGTCA | 30 | G | 485 |
| 1626341 | 61843 | 61858 | N/A | N/A | TAGGTATTATGCTTCA | 18 | G | 486 |
| 1626342 | 38804 | 38819 | N/A | N/A | GGATATAAAGGTAGGT | 7 | G | 487 |
| 1626343 | 108445 | 108460 | N/A | N/A | ATAACTAATTGCCTGC | 77 | G | 488 |
| 1626344 | 17864 | 17879 | N/A | N/A | TAGTATTTGAGATTCG | 3 | G | 489 |
| 1626345 | 21721 | 21736 | N/A | N/A | AGATTAACAACCCTGT | 37 | G | 490 |
| 1626346 | 38972 | 38987 | N/A | N/A | CCATATGTAGTATGTG | 70 | G | 491 |
| 1626347 | 31852 | 31867 | N/A | N/A | GTCAATACGGTTCTTT | 18 | G | 492 |
| 1626348 | 96905 | 96920 | N/A | N/A | GAATTTGAAGCTCCGT | 24 | G | 493 |
| 1626349 | 100640 | 100655 | N/A | N/A | CTGAATAAGGGTATCC | 93 | G | 494 |
| 1626350 | 73501 | 73516 | N/A | N/A | GAGCAATTAGAGTCAT | 24 | G | 495 |
| 1626351 | 107870 | 107885 | N/A | N/A | GACTAAGGTAGATCTC | 70 | G | 496 |
| 1626352 | 109959 | 109974 | N/A | N/A | ATTGTATAGGACTTGT | 65 | G | 497 |
| 1626353 | 72416 | 72431 | N/A | N/A | GATATACTAACCACCC | 51 | G | 498 |
| 1626354 | 100639 | 100654 | N/A | N/A | TGAATAAGGGTATCCA | 65 | G | 499 |
| 1626355 | 9559 | 9574 | N/A | N/A | GCAGAATACCATCAGT | 16 | G | 500 |
| 1626356 | 47246 | 47261 | N/A | N/A | GAAATAATATCAGCCG | 49 | G | 501 |
| 1626357 | 29081 | 29096 | N/A | N/A | TCTTACTAGTAGGTGA | 47 | G | 502 |
| | 63965 | 63980 | | | | | | |
| 1626358 | 21701 | 21716 | N/A | N/A | GAATTTTTACGCTGAT | 17 | G | 503 |
| 1626359 | 94399 | 94414 | N/A | N/A | ACTAATAGGCATCCCA | 39 | G | 504 |
| 1626360 | 116339 | 116354 | 7465 | 7480 | GACAATTAATGTTCCC | 33 | G | 505 |
| 1626361 | 117452 | 117467 | 8578 | 8593 | GTCAATAAGGGTCTTA | 13 | G | 506 |
| 1626362 | 86726 | 86741 | N/A | N/A | GTAGATAAGAACTGCC | 70 | G | 507 |
| 1626363 | 64064 | 64079 | N/A | N/A | GACGAATGAACATCAC | 66 | G | 508 |
| 1626364 | 32404 | 32419 | N/A | N/A | CCAAATAGGGTTCGAT | 30 | G | 509 |
| 1626365 | 106683 | 106698 | N/A | N/A | ATCCGTAAAACATTCA | 39 | G | 510 |
| 1626366 | 98758 | 98773 | N/A | N/A | TACTATACATGAGTCC | 39 | G | 511 |
| 1626367 | 18811 | 18826 | N/A | N/A | GAATATGCTGCCCTCA | 63 | G | 512 |
| 1626368 | 97739 | 97754 | N/A | N/A | TTAATTATACTAGTCG | 75 | G | 513 |
| 1626369 | 93924 | 93939 | N/A | N/A | GCATTACAATCCCCAG | 25 | G | 514 |
| 1626370 | 115090 | 115105 | 6216 | 6231 | CTAATCATGATTGGGA | 30 | G | 515 |
| 1626371 | 50677 | 50692 | N/A | N/A | CCCATATAAGATCTCC | 38 | G | 516 |
| 1626372 | 29082 | 29097 | N/A | N/A | ATCTTACTAGTAGGTG | 65 | G | 517 |
| | 63966 | 63981 | | | | | | |
| 1626373 | 98771 | 98786 | N/A | N/A | GTAGAATAGGCCATAC | 86 | G | 518 |
| 1626374 | 60537 | 60552 | N/A | N/A | GCAGAATAACCACTGG | 67 | G | 519 |
| 1626375 | 73355 | 73370 | N/A | N/A | TCTCATATCAGGATTA | 16 | G | 520 |
| | 75767 | 75782 | | | | | | |
| 1626376 | 116212 | 116227 | 7338 | 7353 | CATAATATCAGGATGG | 28 | G | 521 |
| 1626377 | 73354 | 73369 | N/A | N/A | CTCATATCAGGATTAC | 5 | G | 522 |
| | 75766 | 75781 | | | | | | |
| 1626378 | 29479 | 29494 | N/A | N/A | CCAAATCAAAACCCGT | 25 | G | 523 |
| 1626379 | 35977 | 35992 | N/A | N/A | GATAATTACCAGTCTA | 65 | G | 524 |
| 1626380 | 92752 | 92767 | N/A | N/A | CCAATAAAAGTTCGGT | 75 | G | 525 |
| 1626381 | 18505 | 18520 | N/A | N/A | CTAGTAATAACAGGCT | 67 | G | 526 |
| 1626382 | 67011 | 67026 | N/A | N/A | GATTATGAGATTCCTC | 62 | G | 527 |
| 1626383 | 82952 | 82967 | N/A | N/A | AAAATTGAGGATTCGA | 43 | G | 528 |
| 1626384 | 20228 | 20243 | N/A | N/A | ACCAATTACATGGCAC | 28 | G | 529 |
| 1626385 | 4425 | 4440 | N/A | N/A | CACTTTATATAGCCAG | 10 | G | 530 |
| 1626386 | 18927 | 18942 | N/A | N/A | AAGGTTAGAATACCCA | 101 | G | 531 |
| 1626387 | 57855 | 57870 | N/A | N/A | CATCTACGATATTCAG | 37 | G | 532 |
| 1626388 | 73500 | 73515 | N/A | N/A | AGCAATTAGAGTCATC | 7 | G | 533 |
| 1626389 | 94401 | 94416 | N/A | N/A | GCACTAATAGGCATCC | 78 | G | 534 |
| 1626390 | 93953 | 93968 | N/A | N/A | GAATATCATTGATTGG | 23 | G | 535 |
| 1626391 | 68433 | 68448 | N/A | N/A | AAGTAGTATAGTGTGC | 31 | G | 536 |
| 1626392 | 9470 | 9485 | N/A | N/A | ATCAATGTAAGTGGTC | 36 | G | 537 |
| 1626393 | 84590 | 84605 | N/A | N/A | GGACTATAATGATCTT | 76 | G | 538 |
| | 84903 | 84918 | | | | | | |
| 1626394 | 98651 | 98666 | N/A | N/A | GCATTAGTAAATCTCC | 47 | G | 539 |
| 1626395 | 23090 | 23105 | N/A | N/A | GTTTATACAGCCATCA | 28 | G | 540 |
| 1626396 | 28923 | 28938 | N/A | N/A | CTATAGTATATGTCTG | 65 | G | 541 |
| 1626397 | 107970 | 107985 | N/A | N/A | CTTTATTACTAGCGGT | 47 | G | 542 |
| 1626398 | 6356 | 6371 | N/A | N/A | GGAAATTCGATTTCTG | 61 | G | 543 |
| 1626399 | 94944 | 94959 | N/A | N/A | GAAAATTTCGAGTCTT | 55 | G | 544 |
| 1626400 | 28468 | 28483 | N/A | N/A | GATGTAATATGGGCAA | 5 | G | 545 |
| 1626401 | 97740 | 97755 | N/A | N/A | CTTAATTATACTAGTC | 76 | G | 546 |
| 1626402 | 50676 | 50691 | N/A | N/A | CCATATAAGATCTCCC | 84 | G | 547 |
| 1626403 | 114384 | 114399 | 5510 | 5525 | CTTATTAAAGGTGTCC | 29 | G | 548 |
| 1626404 | 73836 | 73851 | N/A | N/A | AAGCATAGTACGCAGC | 32 | G | 549 |
| 1626405 | 68430 | 68445 | N/A | N/A | TAGTATAGTGTGCCTA | 47 | G | 550 |
| 1626406 | 68165 | 68180 | N/A | N/A | GATAATTTACGACCGT | 77 | G | 551 |
| 1626407 | 9325 | 9340 | N/A | N/A | GCAGTATAGAGTCCTT | 6 | G | 552 |
| 1626408 | 69088 | 69103 | N/A | N/A | CTCGATAAAGCATGTG | 18 | G | 553 |
| 1626409 | 26542 | 26557 | N/A | N/A | GACTTAACATGACTCC | 48 | G | 554 |
| 1626410 | 11934 | 11949 | N/A | N/A | CTTGATTAGTGTTCCA | 8 | G | 555 |
| 1626411 | 68289 | 68304 | 4442 | 4457 | ACAATACAGGCTCCGC | 51 | G | 556 |
| 1626412 | 61423 | 61438 | N/A | N/A | TAAGATGCAAGGGTCC | 29 | G | 557 |
| 1626413 | 93017 | 93032 | N/A | N/A | GATACTTAAGTTCTGC | 18 | G | 558 |
| 1626414 | 50392 | 50407 | N/A | N/A | ACAGTATGAGCTCTCC | 74 | G | 559 |
| 1626415 | 63951 | 63966 | N/A | N/A | GATACTACATACCCAG | 43 | G | 560 |

### Example 4: Effect of Modified Oligonucleotides on Human PCDH19 In Vitro, Multiple Doses

[0464] SHSY5Y cells, plated at a density of 8,000 cells/well, were differentiated in Neurobasal media supplemented with B27 (ThermoFisher), penicillin/streptomycin (ThermoFisher), and 10 μM retinoic acid (Sigma) for 10 days. Differentiated SH-SY5Y cells were treated with modified oligonucleotides at concentrations indicated in the table below by free uptake. After a treatment period of approximately 5 days, total RNA was isolated from the cells and PCDH19 RNA levels were measured by quantitative real-time RT-PCR using human PCDH19 primer-probe set RTS53390 (described herein above) was used to measure RNA levels. PCDH19 RNA levels were normalized to total RNA content, as measured by GAPDH. Human GAPDH was measured using the human primer-probe set RTS104 (described herein above). Reduction of PCDH19 RNA is presented in the tables below as percent PCDH19 RNA, relative to untreated control cells (% UTC).

[0465] The half maximal inhibitory concentration (IC₅₀) of each modified oligonucleotide was calculated using a linear regression on a log/linear plot of the data in Excel and is also presented in the table below.

TABLE 5
Dose-dependent reduction of human PCDH19 RNA in differentiated
SH-SY5Y cells by modified oligonucleotides

| | PCDH19 RNA (% UTC) RTS53390 | | | | |
|---|---|---|---|---|---|
| Compound No. | 46 nM | 278 nM | 1667 nM | 10000 nM | IC₅₀ (μM) |
| 1626339 | 47 | 16 | 8 | 2 | <0.046 |
| 1626341 | 135 | 71 | 20 | 1 | 0.88 |
| 1626342 | 91 | 19 | 6 | 3 | 0.19 |
| 1626344 | 16 | 5 | 1 | 0.4 | <0.046 |
| 1626347 | 134 | 47 | 26 | 5 | 0.78 |
| 1626348 | 128 | 58 | 29 | 15 | 1.00 |
| 1626355 | 72 | 41 | 17 | 2 | 0.18 |
| 1626358 | 119 | 54 | 12 | 4 | 0.54 |
| 1626361 | 18 | 13 | 7 | 7 | <0.046 |
| 1626375 | 125 | 52 | 17 | 4 | 0.66 |
| 1626377 | 16 | 6 | 2 | 0.2 | <0.046 |
| 1626383 | 152 | 72 | 42 | 19 | 1.64 |
| 1626385 | 48 | 21 | 7 | 1 | <0.046 |
| 1626388 | 48 | 27 | 8 | 5 | <0.046 |
| 1626395 | 133 | 45 | 19 | 3 | 0.68 |
| 1626400 | 49 | 9 | 2 | 0.1 | <0.046 |
| 1626407 | 15 | 2 | 0.2 | 0 | <0.046 |
| 1626408 | 132 | 69 | 30 | 14 | 1.13 |
| 1626410 | 70 | 5 | 2 | 1 | 0.05 |

### Example 5: Design of 5-10-5 MOE Gapmer Modified Oligonucleotides with PS Internucleoside Linkages that Target a Human PCDH19 Nucleic Acid

[0466] Modified oligonucleotides complementary to a human PCDH19 nucleic acid were designed, as described in the table below. “Start site” indicates the 5′-most nucleoside to which the modified oligonucleotide is complementary in the target nucleic acid sequence. “Stop site” indicates the 3′-most nucleoside to which the modified oligonucleotide is complementary in the target nucleic acid sequence. Each modified oligonucleotide listed in the table below is 100% complementary to SEQ ID NO: 1 (described herein above), to SEQ ID NO: 2 (described herein above), or to both. ‘N/A’ indicates that the modified oligonucleotide has two or more mismatches to that particular target nucleic acid sequence.

[0467] The modified oligonucleotides in the table below are 5-10-5 MOE modified oligonucleotides with uniform phosphorothioate internucleoside linkages. The modified oligonucleotides are 20 nucleosides in length, wherein the central gap segment consists of ten 2′-β-D-deoxynucleosides, and wherein the 5′ and 3′ wing segments each consist of five 2′-MOE nucleosides. The sugar motif for the modified oligonucleotides is (from 5′ to 3′): eeeeeddddddddddeeeee; wherein each “d” represents a 2′-β-D-deoxyribosyl sugar moiety, and each “e” represents a 2′-MOE ribosyl sugar moiety. The internucleoside linkage motifs for the modified oligonucleotides is (from 5′ to 3′): sssssssssssssssssss; wherein each “s” represents a phosphorothioate internucleoside linkage. All cytosine nucleobases are 5-methylcytosines.

TABLE 6
5-10-5 MOE modified oligonucleotides with uniform phosphorothioate internucleoside linkages
complementary to human PCDH19

| | SEQ ID | SEQ ID | SEQ ID | SEQ ID | | SEQ |
|---|---|---|---|---|---|---|
| Compound | NO: 1 | NO: 1 | NO: 2 | NO: 2 | | ID |
| No. | Start Site | Stop Site | Start Site | Stop Site | Sequence (5′ to 3′) | NO |
| 1653805 | 10648 | 10667 | N/A | N/A | GTGTCATTTTCCCTACGCAG | 75 |
| 1653806 | 10817 | 10836 | N/A | N/A | CTTGTCTTTTTCATCTCTCT | 241 |
| 1653807 | 73316 | 73335 | N/A | N/A | TGGGATATCCACATCATCAA | 90 |
| | 75728 | 75747 | | | | |
| 1653808 | 32756 | 32775 | N/A | N/A | GCACTCATTTTTGTAAACTC | 341 |
| 1653809 | 43411 | 43430 | N/A | N/A | GCATTTCTTTTCTACCAGTA | 171 |
| 1653810 | 115316 | 115335 | 6442 | 6461 | GTTCACATTTTTAATCAAAA | 82 |
| 1653811 | 17984 | 18003 | N/A | N/A | GCACACTTCTTTTTCTATTT | 267 |
| 1653812 | 10818 | 10837 | N/A | N/A | TCTTGTCTTTTTCATCTCTC | 320 |
| 1653813 | 7441 | 7460 | 3983 | 4002 | TTGATTTCTTTTGATGCCCA | 124 |
| 1653814 | 41756 | 41775 | N/A | N/A | ATGCTTGTTTTCTTCCTCTC | 143 |
| 1653815 | 5510 | 5529 | N/A | N/A | GCTGATTTCTTTTTCATCAA | 251 |
| 1653816 | 21748 | 21767 | N/A | N/A | TTCCGATGTTTTATCCTCAT | 369 |
| 1653817 | 4534 | 4553 | N/A | N/A | GCTATTTTTACTGAAACATC | 63 |
| 1653818 | 12550 | 12569 | N/A | N/A | AGTTGCATTTTCTTCCTCCA | 333 |
| 1653819 | 20420 | 20439 | N/A | N/A | CTGGTATTTTTCTTTGTGCT | 471 |
| 1653820 | 80720 | 80739 | N/A | N/A | GCATCAGTTTTTCTTCTAAA | 216 |
| 1653821 | 34367 | 34386 | N/A | N/A | GCTGTCACTTTTCCATACTA | 20 |
| 1653822 | 78891 | 78910 | N/A | N/A | GTCTGTTTTATCTATCCACT | 329 |
| 1653823 | 25522 | 25541 | N/A | N/A | ACATCATTTTTCATGTGGTC | 21 |
| 1653824 | 43531 | 43550 | N/A | N/A | GCACATCATTCTTATTTATT | 379 |
| 1653825 | 10821 | 10840 | N/A | N/A | ATTTCTTGTCTTTTTCATCT | 391 |
| 1653826 | 72604 | 72623 | N/A | N/A | ATTCTCTCTCATTTCCACCC | 22 |
| 1653827 | 59851 | 59870 | N/A | N/A | CGTACATTTTCATACCAAGA | 95 |
| 1653828 | 17980 | 17999 | N/A | N/A | ACTTCTTTTTCTATTTCTAA | 94 |

### Example 6: Design of RNAi Compounds that Target a Human PCDH19 Nucleic Acid

[0468] RNAi compounds comprising antisense RNAi oligonucleotides complementary to a human PCDH19 nucleic acid, and sense RNAi oligonucleotides complementary to the antisense RNAi oligonucleotides were designed as follows.

[0469] The antisense RNAi oligonucleotide in each case is 23 nucleosides in length; has a sugar motif (from 5′ to 3′) of: yfyyyfyyyyyyyfyfyyyyyyy; wherein each ‘y’ represents a 2′-O-methylribosyl sugar moiety and each “f” represents a 2′-fluororibosyl sugar; and an internucleoside linkage motif (from 5′ to 3′) of: ssooooooooooooooooooss; wherein ‘o’ represents a phosphodiester internucleoside linkage and ‘s’ represents a phosphorothioate internucleoside linkage. Each cytosine residue is a non-methylated cytosine. Each antisense RNAi oligonucleotide has a terminal phosphate at the 5′-end. The antisense RNAi oligonucleotides are listed below in Tables 7 and 8.

[0470] “Start site” indicates the 5′-most nucleoside to which the antisense RNAi oligonucleotide is complementary in the target nucleic acid sequence. “Stop site” indicates the 3′-most nucleoside to which the antisense RNAi oligonucleotide is complementary in the target nucleic acid sequence. Each antisense RNAi oligonucleoside listed in the Table 7 below is 100% complementary to SEQ ID NO: 1 (ENSEMBL Accession No. ENSG00000165194.15 from version 104: May 2021), to SEQ ID NO: 2 (ENSEMBL Accession No. ENST00000373034.8 from version 104: May 2021), or to both. ‘N/A’ indicates that the antisense RNAi oligonucleotide is not 100% complementary to that particular target nucleic acid sequence in Table 7 below.

TABLE 7
Design of antisense strand modified oligonucleotides targeted to human PCDH19

| | SEQ ID | SEQ ID | SEQ ID | SEQ ID | | |
|---|---|---|---|---|---|---|
| Antisense | NO: 1 | NO: 1 | NO: 2 | NO: 2 | | |
| Strand | Strand | Strand | Strand | Strand | | |
| Compound | Start Site | Stop Site | Start Site | Stop Site | | SEQ |
| No. | Antisense | Antisense | Antisense | Antisense | Antisense Strand Sequence (5′ to 3′) | ID NO |
| 1688321 | 327 | 349 | 327 | 349 | UGUCUCGCUUUCUCUGUCUGUCU | 561 |
| 1688324 | 329 | 351 | 329 | 351 | UCUGUCUCGCUUUCUCUGUCUGU | 562 |
| 1688327 | 408 | 430 | 408 | 430 | UUGAUUUCAUCUUCCCGGAGAGG | 563 |
| 1688339 | 697 | 719 | 697 | 719 | UCAAAGCCCCGGUCUUUCUAAUG | 564 |
| 1688357 | 785 | 807 | 785 | 807 | UUCGUCUAGGAAAUCAAAGUUAA | 565 |
| 1688363 | 1254 | 1276 | 1254 | 1276 | UACUUGAGGCGAAGGUAAAGAGG | 566 |
| 1688369 | 1359 | 1381 | 1359 | 1381 | UUUACCCCUUCAAAGUUAGCCGG | 567 |
| 1688381 | 1752 | 1774 | 1752 | 1774 | UGCUCCUCUUCUACCGAGUACUU | 568 |
| 1688399 | 1987 | 2009 | 1987 | 2009 | UUCCAUUGAGCUGGACAUGACCU | 569 |
| 1688417 | 2235 | 2257 | 2235 | 2257 | UUUUCCACCACGAGUUCGGCAAA | 570 |
| 1688423 | 2352 | 2374 | 2352 | 2374 | UCAUUGGAGUCGGUCACCUUGAU | 571 |
| 1688432 | 2493 | 2515 | 2493 | 2515 | UAGCCAUAGAAGGAGUAGACCAC | 572 |
| 1688435 | 2502 | 2524 | 2502 | 2524 | UCGUUGACGUAGCCAUAGAAGGA | 573 |
| 1688438 | 2571 | 2593 | 2571 | 2593 | UAGUCUAAAGCGCCAGUGACAGU | 574 |
| 1688441 | 2577 | 2599 | 2577 | 2599 | UCUUCGUAGUCUAAAGCGCCAGU | 575 |
| 1688444 | 2694 | 2716 | 2694 | 2716 | UUGAUGACCGGCGGAUUGUCAUU | 576 |
| 1688447 | 2709 | 2731 | 2709 | 2731 | UUGACUGACAGCAGGUUGAUGAC | 577 |
| 1688450 | 2724 | 2746 | 2724 | 2746 | UCCACAAGCUCACUGUUGACUGA | 578 |
| 1688459 | 2877 | 2899 | 2877 | 2899 | UCCACCAGAAUAGUGGAGAAGCU | 579 |
| 1688462 | 2920 | 2942 | 2920 | 2942 | UGUGAGGUUGUAUUGGUCGUGCU | 580 |
| 1688468 | 2984 | 3006 | 2984 | 3006 | UGAUGAGCACGGUAAAGGACUUG | 581 |
| 1688471 | 2999 | 3021 | 2999 | 3021 | UGUCAUUUUCGUCAGUGAUGAGC | 582 |
| 1688480 | 3030 | 3052 | 3030 | 3052 | UGGUAGUAGGGCUUGGAAAAGUG | 583 |
| 1688483 | 3045 | 3067 | 3045 | 3067 | UCCUGCACAAUGACCUGGUAGUA | 584 |
| 1688492 | 3186 | 3208 | 3186 | 3208 | UUGGGAUUGAUGGAGACAUAGGU | 585 |
| 1688495 | 3201 | 3223 | 3201 | 3223 | UAGAUGUCGCCUGAGUUGGGAUU | 586 |
| 1688498 | 3219 | 3241 | 3219 | 3241 | UUAAAGGAUCGCAGCGCGUAGAU | 587 |
| 1688501 | 3234 | 3256 | 3234 | 3256 | UUGGUCUGCUCGUGGUUAAAGGA | 588 |
| 1688504 | 3249 | 3271 | 3249 | 3271 | UUGAAUUCGAACGCCUUGGUCUG | 589 |
| 1688507 | 3261 | 3283 | 3261 | 3283 | UUGGCCAGCACCUUGAAUUCGAA | 590 |
| 1688510 | 3330 | 3352 | 3330 | 3352 | UUGUCGUUGACGUCGAGGAUGAU | 591 |
| 1688513 | 3363 | 3385 | 3363 | 3385 | UUAAUCAGAGGUGGGGCUGUGAU | 592 |
| 1688519 | 3438 | 3460 | 3438 | 3460 | UAGUCUUCUGCCUUGACAACAGU | 593 |
| 1688522 | 3453 | 3475 | 3453 | 3475 | UUUUCGCCCUCAUCGUAGUCUUC | 594 |
| 1688528 | 3507 | 3529 | 3507 | 3529 | UCUAUUUCAAAGAAGCCGCGGUC | 595 |
| 1688531 | 3522 | 3544 | 3522 | 3544 | UCGCCAUUGACCUGGUCUAUUUC | 596 |
| 1688537 | 3575 | 3597 | 3575 | 3597 | UAAGCUCAUAGGAGGACUUGGAG | 597 |
| 1688540 | 3588 | 3610 | 3588 | 3610 | UGAGCCACCACGAUAAGCUCAUA | 598 |
| 1688549 | 3681 | 3703 | 3681 | 3703 | UUCACAGAGCCCAUUGACUCUUG | 599 |
| 1688561 | 3737 | 3759 | 3737 | 3759 | UUACAAAGAGGAUGCCCGCAAUG | 600 |
| 1688576 | N/A | N/A | 3811 | 3833 | UAAACAAUUACUGCAGUUGUAGG | 601 |
| 1688582 | 6627 | 6649 | 3841 | 3863 | UAUAAAACAGCCGAGGAGACAAG | 602 |
| 1688594 | 6680 | 6702 | 3894 | 3916 | UCGCUAAUGGGAGAAACCGAGAU | 603 |
| 1688597 | 6695 | 6717 | 3909 | 3931 | UUUUUGUCUUGCUCCUCGCUAAU | 604 |
| 1688603 | 6725 | 6747 | 3939 | 3961 | UUUCCCCUUAGGCUCACUUUCUC | 605 |
| 1688606 | N/A | N/A | 3954 | 3976 | UACUCAGCAAUUCUCUUUCCCCU | 606 |
| 1688953 | 7568 | 7590 | 4110 | 4132 | UGCUGGUGGUAGUCAAAAUAGUU | 607 |
| 1688968 | 7649 | 7671 | 4191 | 4213 | UUAGCACUGGUGUUGCGGGUAUU | 608 |
| 1688971 | 7664 | 7686 | 4206 | 4228 | UGAUGGUAGAUGUGGUUAGCACU | 609 |
| 1688974 | 7679 | 7701 | 4221 | 4243 | UGGCUGUUGAAAGAGUGAUGGUA | 610 |
| 1688980 | 7709 | 7731 | 4251 | 4273 | UUGAUAAUCAGGUCAGGCUGCUG | 611 |
| 1688986 | N/A | N/A | 4281 | 4303 | UAGUUUUCAGUCUCAGGCAGAGG | 612 |
| 1688989 | 59573 | 59595 | 4296 | 4318 | UUGGAGUCAAAAGAAUAGUUUUC | 613 |
| 1688995 | 59602 | 59624 | 4325 | 4347 | UGAUUAAAUGGGCUCGGCUAUUC | 614 |
| 1689001 | 68200 | 68222 | 4353 | 4375 | UCUAAGUCCUUGAAGGUGGAGCU | 615 |
| 1689007 | 68227 | 68249 | 4380 | 4402 | UGUCCACUAUCCUUCAGGCUGUU | 616 |
| 1689016 | 68266 | 68288 | 4419 | 4441 | UGGACAUCAUGCUCACUGUCAGU | 617 |
| 1689028 | 68347 | 68369 | 4500 | 4522 | UGAUCAGGCAUCUGAGAUCCCAU | 618 |
| 1689034 | 113404 | 113426 | 4530 | 4552 | UCCCGGCAAUGAAAUCCUUCAUU | 619 |
| 1689043 | 113515 | 113537 | 4641 | 4663 | UCAAUAGACAGCGCGAUGAUGUU | 620 |
| 1689046 | 113530 | 113552 | 4656 | 4678 | UCAGCAGCAGUAGCUUCAAUAGA | 621 |
| 1689061 | 113602 | 113624 | 4728 | 4750 | UGGUCGCUGACAUCUUUCCCAAA | 622 |
| 1689076 | 113824 | 113846 | 4950 | 4972 | UUGACAUACUGCUCCAGAUCACG | 623 |
| 1689085 | 113892 | 113914 | 5018 | 5040 | UGACUUUCUCGCUAUCAGCUCCA | 624 |
| 1689091 | 113931 | 113953 | 5057 | 5079 | UGUUGCGACCUUCCUUCAGAAUG | 625 |
| 1689097 | 113950 | 113972 | 5076 | 5098 | UUCACACCAGGGGACUCUUUGUU | 626 |
| 1689106 | 113995 | 114017 | 5121 | 5143 | UCUUCUUCCUGGAGACUGGUUUA | 627 |
| 1689118 | 114054 | 114076 | 5180 | 5202 | UUGGUGAGCAAUUAAAACAAGAA | 628 |
| 1689124 | 114084 | 114106 | 5210 | 5232 | UCUGAAAUAUAGCCACUCAAGAA | 629 |
| 1689130 | 114114 | 114136 | 5240 | 5262 | UCACCUAUAAACAAUACAUUUAG | 630 |
| 1689136 | 114144 | 114166 | 5270 | 5292 | UUGAAACAAGGGACUGUCACAGA | 631 |
| 1689139 | 114150 | 114172 | 5276 | 5298 | UGCCUGUUGAAACAAGGGACUGU | 632 |
| 1689154 | 114228 | 114250 | 5354 | 5376 | UUGUCUCUGUUUCCCCAACAUCA | 633 |
| 1689157 | 114243 | 114265 | 5369 | 5391 | UUUUCACAACUGAAUUUGUCUCU | 634 |
| 1689166 | 114288 | 114310 | 5414 | 5436 | UUGACAUAGAAAAAUAUAUAAAU | 635 |
| 1689169 | 114302 | 114324 | 5428 | 5450 | UUUAUAUUAUAAUUUUGACAUAG | 636 |
| 1689175 | 114332 | 114354 | 5458 | 5480 | UUAAAUGUAAUCCUCCACAAACA | 637 |
| 1689178 | 114347 | 114369 | 5473 | 5495 | UCACUUUUUGCUUUUUUAAAUGU | 638 |
| 1689199 | 114452 | 114474 | 5578 | 5600 | UCACAUCACUGAAUCAAUGAAUA | 639 |
| 1689202 | 114467 | 114489 | 5593 | 5615 | UUUGGGGGCUCAAUUUCACAUCA | 640 |
| 1689208 | 114497 | 114519 | 5623 | 5645 | UGGGAAGUACUCGAGCUUCAGAA | 641 |
| 1689214 | 114534 | 114556 | 5660 | 5682 | UUUUAAAGCAGGGGUGUCCACAG | 642 |
| 1689235 | 114639 | 114661 | 5765 | 5787 | UUUUUAAGAAAAAGAAAACACCA | 643 |
| 1689238 | 114654 | 114676 | 5780 | 5802 | UGUAGUUUUAUUAUUUUUUUAAG | 644 |
| 1689244 | 114684 | 114706 | 5810 | 5832 | UGUCUCAGUUGUUUGCACUUUGU | 645 |
| 1689247 | 114699 | 114721 | 5825 | 5847 | UGCUCAUUCAUUUGCUGUCUCAG | 646 |
| 1689259 | 114759 | 114781 | 5885 | 5907 | UCACUACAUGAGUUAAAAAACGU | 647 |
| 1689280 | 114856 | 114878 | 5982 | 6004 | UAGCAGCCUAUCCAAAAAUGACU | 648 |
| 1689304 | 114970 | 114992 | 6096 | 6118 | UUCUAAGCCUGGAAACAUAACUU | 649 |
| 1689307 | 114985 | 115007 | 6111 | 6133 | UUGGAGAGAGGGAAUUUCUAAGC | 650 |
| 1689310 | 115000 | 115022 | 6126 | 6148 | UUCAAUUUUAGAUGAUUGGAGAG | 651 |
| 1689328 | 115090 | 115112 | 6216 | 6238 | UCUAAUUCUAAUCAUGAUUGGGA | 652 |
| 1689331 | 115105 | 115127 | 6231 | 6253 | UGACGUGCUUUGCAGUCUAAUUC | 653 |
| 1689346 | 115176 | 115198 | 6302 | 6324 | UACUGCUUACUCUAUCCCUACGU | 654 |
| 1689352 | 115206 | 115228 | 6332 | 6354 | UUACCUGUCUUUUCCAAAAUAUA | 655 |
| 1689361 | 115251 | 115273 | 6377 | 6399 | UCCGUUUAGAAGGCACAGUAAUU | 656 |
| 1689367 | 115281 | 115303 | 6407 | 6429 | UAAAAAGAUGAGUUCAAGUGUCU | 657 |
| 1689373 | 115311 | 115333 | 6437 | 6459 | UCACAUUUUUAAUCAAAAAACUA | 658 |
| 1689376 | 115326 | 115348 | 6452 | 6474 | UUAGUAUUUUCUUGUUCACAUUU | 659 |
| 1689385 | 115371 | 115393 | 6497 | 6519 | UAGCCUACAGCAAAAAGAGUUGG | 660 |
| 1689403 | 115461 | 115483 | 6587 | 6609 | UAAUAGACAAAAGAUAAAUGGGG | 661 |
| 1689406 | 115476 | 115498 | 6602 | 6624 | UUGGCUAGUGAAUAUUAAUAGAC | 662 |
| 1689409 | 115491 | 115513 | 6617 | 6639 | UGCAAAAAUACUAUGUUGGCUAG | 663 |
| 1689427 | 115581 | 115603 | 6707 | 6729 | UUGUUUCUCUAGAAACAACUCUC | 664 |
| 1689439 | 115641 | 115663 | 6767 | 6789 | UUCUCUCUGUGUAUUCCUGAAUU | 665 |
| 1689442 | 115656 | 115678 | 6782 | 6804 | UCUAACCUCUAGGCCUUCUCUCU | 666 |
| 1689445 | 115671 | 115693 | 6797 | 6819 | UUUGCAUUCUAGUGCUCUAACCU | 667 |
| 1689451 | 115701 | 115723 | 6827 | 6849 | UCUACCUAAACUUAAGAAAAUAA | 668 |
| 1689463 | 115761 | 115783 | 6887 | 6909 | UAAUGCGUAAAGCUAGGAACUCA | 669 |
| 1689469 | 115791 | 115813 | 6917 | 6939 | UCUCCCUCCUGUAAAAGAAAAUA | 670 |
| 1689472 | 115801 | 115823 | 6927 | 6949 | UCAAAACCCUUCUCCCUCCUGUA | 671 |
| 1689478 | 115868 | 115890 | 6994 | 7016 | UAAGUUCUUUUUCAGAAAUGUUC | 672 |
| 1689481 | 115883 | 115905 | 7009 | 7031 | UUUGUAGCUUCAUUAUAAGUUCU | 673 |
| 1689490 | 115928 | 115950 | 7054 | 7076 | UUUGCAUGAGGUAGUAUUCAGCA | 674 |
| 1689496 | 115958 | 115980 | 7084 | 7106 | UCAGAGGGAAAUUUGCAGCCACA | 675 |
| 1689499 | 115973 | 115995 | 7099 | 7121 | UUAAUUGUGUCAGCUUCAGAGGG | 676 |
| 1689502 | 115988 | 116010 | 7114 | 7136 | UAUGGUAAUUCAUCCUUAAUUGU | 677 |
| 1689517 | 116063 | 116085 | 7189 | 7211 | UCCACUACCAAAAUGAAAUAAAU | 678 |
| 1689523 | 116093 | 116115 | 7219 | 7241 | UGCAAAGAGAAAUAAAUACUUAA | 679 |
| 1689544 | 116198 | 116220 | 7324 | 7346 | UCAGGAUGGAUCAGGGUGAGAAA | 680 |
| 1689562 | 116288 | 116310 | 7414 | 7436 | UUCCCACUGAGCAUAGCAAGAAA | 681 |
| 1689607 | 116523 | 116545 | 7649 | 7671 | UGACUGCCCACUGAGAACAAAGU | 682 |
| 1689619 | 116582 | 116604 | 7708 | 7730 | UUCCUUAAUGAGAGGAAUUCUCU | 683 |
| 1689622 | 116597 | 116619 | 7723 | 7745 | UGUGGGGAAAAAUAUUUCCUUAA | 684 |
| 1689640 | 116678 | 116700 | 7804 | 7826 | UACAGCCUGCCUACAAAACCAGU | 685 |
| 1689691 | 116947 | 116969 | 8073 | 8095 | UCAUUAAAGCAUGUCACACUUCA | 686 |
| 1689694 | 116962 | 116984 | 8088 | 8110 | UUGCCAAAGCAGUUAUCAUUAAA | 687 |
| 1689697 | 116977 | 116999 | 8103 | 8125 | UACCUGUCUGGGGAAUUGCCAAA | 688 |
| 1689700 | 116992 | 117014 | 8118 | 8140 | UUGGAUGAAGAAGUAUACCUGUC | 689 |
| 1689706 | 117022 | 117044 | 8148 | 8170 | UUUGUCUAAAUGAACACCUUAGG | 690 |
| 1689712 | 117052 | 117074 | 8178 | 8200 | UAGAGAUCAGUGGAUCACUAAGC | 691 |
| 1689718 | 117077 | 117099 | 8203 | 8225 | UGUAUUUUUUAAAAAUAUUUCUG | 692 |
| 1689721 | 117092 | 117114 | 8218 | 8240 | UUCAGAGAUCUAAAUUGUAUUUU | 693 |
| 1689724 | 117107 | 117129 | 8233 | 8255 | UGAGUGGUUCCAAUUUUCAGAGA | 694 |
| 1689727 | 117122 | 117144 | 8248 | 8270 | UCAAGAUGAUACUCUUGAGUGGU | 695 |
| 1689742 | 117197 | 117219 | 8323 | 8345 | UAUGAUAGGGCUACAGGGAAAAG | 696 |
| 1689748 | 117227 | 117249 | 8353 | 8375 | UGCUUCAAGUGGACCACUUUUUG | 697 |
| 1689754 | 117252 | 117274 | 8378 | 8400 | UCCCUAAACUGCCCUUUGUCCUU | 698 |
| 1689757 | 117299 | 117321 | 8425 | 8447 | UUUUCCACUCUGGAUGCCCAAUC | 699 |
| 1689781 | 117419 | 117441 | 8545 | 8567 | UAAAGAGCCAAGUGGACCAAACU | 700 |
| 1689784 | 117434 | 117456 | 8560 | 8582 | UCUUAUUACCCGGGGUAAAGAGC | 701 |
| 1689790 | 117464 | 117486 | 8590 | 8612 | UUUAUGCCAGUUUUUCAAAGUCA | 702 |
| 1689808 | 117554 | 117576 | 8680 | 8702 | UACAAUUUGACUCAUGAAAUGAC | 703 |
| 1689811 | 117569 | 117591 | 8695 | 8717 | UUCAGUGUCAGCAGAUACAAUUU | 704 |
| 1689820 | 117614 | 117636 | 8740 | 8762 | UUACUUUGUUACAUACUUAAACU | 705 |
| 1689853 | 117778 | 117800 | 8904 | 8926 | UCACUUUUGCACAACAAGUGACC | 706 |
| 1689862 | 117823 | 117845 | 8949 | 8971 | UUUCUUUGUUUCACAAAAGCAAU | 707 |
| 1689871 | 117868 | 117890 | 8994 | 9016 | UACCAAGAGCGCCUUCCAAUCUA | 708 |
| 1689874 | 117883 | 117905 | 9009 | 9031 | UUGUGGGUUAUUCUUUACCAAGA | 709 |
| 1689889 | 117951 | 117973 | 9077 | 9099 | UGGAGCAACAGUCAGCAUCAUCA | 710 |
| 1689901 | 118011 | 118033 | 9137 | 9159 | UGCUAAGGUUGACAGCAACUUUC | 711 |
| 1689916 | 118096 | 118118 | 9222 | 9244 | UAUCCUAGCCUUCCUCAGCUGAA | 712 |
| 1689925 | 118141 | 118163 | 9267 | 9289 | UGAUUUCUAGCUCGAGCUAGUCU | 713 |
| 1689949 | 118272 | 118294 | 9398 | 9420 | UUUCCACCCUGGUUUGACAGGUA | 714 |
| 1689952 | 118287 | 118309 | 9413 | 9435 | UUGCAUCCCUCUAAAUUUCCACC | 715 |
| 1689955 | 118302 | 118324 | 9428 | 9450 | UGAGACAUACUGUACUUGCAUCC | 716 |
| 1689961 | 118332 | 118354 | 9458 | 9480 | UUCAUAUAAUCAGCAACAGAGAC | 717 |
| 1689964 | 118347 | 118369 | 9473 | 9495 | UACAACAAUUUUAUCUUCAUAUA | 718 |
| 1689973 | 118392 | 118414 | 9518 | 9540 | UGAUUCAAUCACUGUGAAAAUGU | 719 |
| 1689976 | 118407 | 118429 | 9533 | 9555 | UUUUUCUUUUUACAAUGAUUCAA | 720 |
| 1690009 | 118567 | 118589 | 9693 | 9715 | UUUUUGAAGCAGAGAAAACACAU | 721 |
| 1690015 | 118597 | 118619 | 9723 | 9745 | UAAUAGCCUUUAAUACUAAAAUG | 722 |

[0471] “Start site” indicates the 5′-most nucleoside to which the antisense RNAi oligonucleotide is complementary in the target nucleic acid sequence. “Stop site” indicates the 3′-most nucleoside to which the antisense RNAi oligonucleotide is complementary in the target nucleic acid sequence. Each antisense RNAi oligonucleoside listed in the Table 8 below is complementary to SEQ ID NO: 1 (ENSEMBL Accession No. ENSG00000165194.15 from version 104: May 2021), to SEQ ID NO: 2 (ENSEMBL Accession No. ENST00000373034.8 from version 104: May 2021), or to both with the exception of a single mismatch at position 1 (from 5′ to 3′) of the antisense RNAi oligonucleotide. “N/A” indicates that the antisense RNAi oligonucleotide has two or more mismatches to that particular target nucleic acid sequence in Table 8 below.

TABLE 8
Design of antisense strand modified oligonucleotides targeted to human PCDH19

| | SEQ ID | SEQ ID | SEQ ID | SEQ ID | | |
|---|---|---|---|---|---|---|
| Antisense | NO: 1 | NO: 1 | NO: 2 | NO: 2 | | |
| Strand | Antisense | Antisense | Antisense | Antisense | | |
| Compound | Strand | Strand | Strand | Strand | | SEQ |
| No. | Start Site | Stop Site | Start Site | Stop Site | Antisense Strand Sequence (5′ to 3′) | ID NO |
| 1688312 | 190 | 211 | 190 | 211 | UUUUCGGAUGAAAUCGCUCAGCC | 723 |
| 1688315 | 205 | 226 | 205 | 226 | UGUAGGAGGUUUAGGAUUUCGGA | 724 |
| 1688318 | 216 | 237 | 216 | 237 | UAUGGGUUUGGGGUAGGAGGUUU | 725 |
| 1688330 | 423 | 444 | 423 | 444 | UCUUGCAGGAGCGUCUUGAUUUC | 726 |
| 1688333 | 430 | 451 | 430 | 451 | UAAGUUUACUUGCAGGAGCGUCU | 727 |
| 1688336 | 445 | 466 | 445 | 466 | UAUUUUGUCGCCGCCGAAGUUUA | 728 |
| 1688342 | 712 | 733 | 712 | 733 | UUUUGUCCAAGAAAAUCAAAGCC | 729 |
| 1688345 | 723 | 744 | 723 | 744 | UGGAGAUGGCAAUUUGUCCAAGA | 730 |
| 1688348 | 738 | 759 | 738 | 759 | UAGUUUGUGGAAACGGGGAGAUG | 731 |
| 1688351 | 748 | 769 | 748 | 769 | UCUCCACGUCAAGUUUGUGGAAA | 732 |
| 1688354 | 770 | 791 | 770 | 791 | UAAGUUAACAACGCAGUCCGACC | 733 |
| 1688360 | 792 | 813 | 792 | 813 | UGGCGUUUUCGUCUAGGAAAUCA | 734 |
| 1688366 | 1259 | 1280 | 1259 | 1280 | UACAGUACUUGAGGCGAAGGUAA | 735 |
| 1688372 | 1370 | 1391 | 1370 | 1391 | UGCUACUCAGUUUUACCCCUUCA | 736 |
| 1688375 | 1733 | 1754 | 1733 | 1754 | UCUUGAGAUUAAUGAGGGCGGCA | 737 |
| 1688378 | 1748 | 1769 | 1748 | 1769 | UCUCUUCUACCGAGUACUUGAGA | 738 |
| 1688384 | 1879 | 1900 | 1879 | 1900 | UUUGAUGUCCACUAGGUGUGGAG | 739 |
| 1688387 | 1888 | 1909 | 1888 | 1909 | UGAGCUGGGAUUGAUGUCCACUA | 740 |
| 1688390 | 1915 | 1936 | 1915 | 1936 | UAUCUUCUGCUUGGUGACCAGCA | 741 |
| 1688393 | 1930 | 1951 | 1930 | 1951 | UAGCAGAUCACGGUCAAUCUUCU | 742 |
| 1688396 | 1932 | 1953 | 1932 | 1953 | UACAGCAGAUCACGGUCAAUCUU | 743 |
| 1688402 | 2002 | 2023 | 2002 | 2023 | UUUUAUCACGCAGAUUUCCAUUG | 744 |
| 1688405 | 2017 | 2038 | 2017 | 2038 | UUCCUUGAUCUCCACCUUUAUCA | 745 |
| 1688408 | 2031 | 2052 | 2031 | 2052 | UCAUUGUCGUUCAGGUCCUUGAU | 746 |
| 1688411 | 2135 | 2156 | 2135 | 2156 | UGCUUCCUGAGUCUGGAUCGUAA | 747 |
| 1688414 | 2137 | 2158 | 2137 | 2158 | UAAGCUUCCUGAGUCUGGAUCGU | 748 |
| 1688420 | 2337 | 2358 | 2337 | 2358 | UCCUUGAUACUAAGGCCAACGGU | 749 |
| 1688426 | 2367 | 2388 | 2367 | 2388 | UACACCGGGUUGUUGUCAUUGGA | 750 |
| 1688429 | 2371 | 2392 | 2371 | 2392 | UCUAAACACCGGGUUGUUGUCAU | 751 |
| 1688453 | 2851 | 2872 | 2851 | 2872 | UUAUUCCUGCAGUCGAAAGGGCA | 752 |
| 1688456 | 2866 | 2887 | 2866 | 2887 | UGUGGAGAAGCUCUCAUAUUCCU | 753 |
| 1688465 | 2931 | 2952 | 2931 | 2952 | UGUGCCUGAAUUGUGAGGUUGUA | 754 |
| 1688474 | 3014 | 3035 | 3014 | 3035 | UAAAGUGCGGGUGGUUGUCAUUU | 755 |
| 1688477 | 3015 | 3036 | 3015 | 3036 | UAAAAGUGCGGGUGGUUGUCAUU | 756 |
| 1688486 | 3055 | 3076 | 3055 | 3076 | UGUGUUGUUCUCCUGCACAAUGA | 757 |
| 1688489 | 3171 | 3192 | 3171 | 3192 | UCAUAGGUGAAGACAGGCAUGUC | 758 |
| 1688516 | 3423 | 3444 | 3423 | 3444 | UCAACAGUCACCAGGUAGCCUAU | 759 |
| 1688525 | 3455 | 3476 | 3455 | 3476 | UAUUUUCGCCCUCAUCGUAGUCU | 760 |
| 1688534 | 3525 | 3546 | 3525 | 3546 | UCUUCGCCAUUGACCUGGUCUAU | 761 |
| 1688543 | 3638 | 3659 | 3638 | 3659 | UGUAGAUUAGGACGAGAGCAGAG | 762 |
| 1688546 | 3652 | 3673 | 3652 | 3673 | UAGAGCAGGGGACAAGUAGAUUA | 763 |
| 1688552 | 3696 | 3717 | 3696 | 3717 | UAAAUCAAGGACAAGUUCACAGA | 764 |
| 1688555 | 3711 | 3732 | 3711 | 3732 | UCCAGGGCAAUAAUGAAAAUCAA | 765 |
| 1688558 | 3718 | 3739 | 3718 | 3739 | UAUGGAGCCCAGGGCAAUAAUGA | 766 |
| 1688564 | 3752 | 3773 | 3752 | 3773 | UCACGAAGAUCAUAGUUACAAAG | 767 |
| 1688567 | 3766 | 3787 | 3766 | 3787 | UUUGCACUUGAUUGCCACGAAGA | 768 |
| 1688570 | 3781 | 3802 | 3781 | 3802 | UUCUUUGUUGUCUCGCUUGCACU | 769 |
| 1688573 | 3796 | 3817 | 3796 | 3817 | UUUGUAGGUCCGGAUCUCUUUGU | 770 |
| 1688579 | 6612 | 6633 | 3826 | 3847 | UAGACAAGUGAUGGUUAAACAAU | 771 |
| 1688585 | 6642 | 6663 | 3856 | 3877 | UCUGUUUUGUCCUUUUAUAAAAC | 772 |
| 1688588 | 6657 | 6678 | 3871 | 3892 | UCAAUGCAGACACUUGCUGUUUU | 773 |
| 1688591 | 6670 | 6691 | 3884 | 3905 | UAGAAACCGAGAUGCAAUGCAGA | 774 |
| 1688600 | 6710 | 6731 | 3924 | 3945 | UCUUUCUCCUCUGUCUUUUUGUC | 775 |
| 1688609 | 7425 | 7446 | 3967 | 3988 | UUGCCCAUAGGAGUACUCAGCAA | 776 |
| 1688612 | 7440 | 7461 | 3982 | 4003 | UCUUGAUUUCUUUUGAUGCCCAU | 777 |
| 1688615 | 7455 | 7476 | 3997 | 4018 | UAUUUUUUUCUUCUUGCUUGAUU | 778 |
| 1688618 | 7470 | 7491 | 4012 | 4033 | UAUGUCAUUCUUACUGAUUUUUU | 779 |
| 1688621 | 7480 | 7501 | 4022 | 4043 | UUACCAGGCGGAUGUCAUUCUUA | 780 |
| 1688624 | 7508 | 7529 | 4050 | 4071 | UUCUUGUCUGUCUCCUCCACAUC | 781 |
| 1688944 | 7523 | 7544 | 4065 | 4086 | UAACUGACAACGUUCAUCUUGUC | 782 |
| 1688947 | 7532 | 7553 | 4074 | 4095 | UGGGAAGAGCAACUGACAACGUU | 783 |
| 1688950 | 7553 | 7574 | 4095 | 4116 | UAAUAGUUGAGGGAGGAGGUCAG | 784 |
| 1688956 | 7572 | 7593 | 4114 | 4135 | UGUCUGCUGGUGGUAGUCAAAAU | 785 |
| 1688959 | 7614 | 7635 | 4156 | 4177 | UUUCAGGAAAGUGCUCUCAGAGC | 786 |
| 1688962 | 7629 | 7650 | 4171 | 4192 | UUUCUGGUUCUCCACAUUCAGGA | 787 |
| 1688965 | 7634 | 7655 | 4176 | 4197 | UGGGUAUUCUGGUUCUCCACAUU | 788 |
| 1688977 | 7680 | 7701 | 4222 | 4243 | UUGGCUGUUGAAAGAGUGAUGGU | 789 |
| 1688983 | 7722 | 7743 | 4264 | 4285 | UAGAGGCACACCGUUGAUAAUCA | 790 |
| 1688992 | 59587 | 59608 | 4310 | 4331 | UGCUAUUCACGUAGUUGGAGUCA | 791 |
| 1688998 | N/A | N/A | 4340 | 4361 | UGGUGGAGCUGCUCUUGAUUAAA | 792 |
| 1689004 | 68209 | 68230 | 4362 | 4383 | UUGUUGCCCUCUAAGUCCUUGAA | 793 |
| 1689010 | 68240 | 68261 | 4393 | 4414 | UUCACUCUCCUCAUGUCCACUAU | 794 |
| 1689013 | 68255 | 68276 | 4408 | 4429 | UUCACUGUCAGUUUGGUCACUCU | 795 |
| 1689019 | 68288 | 68309 | 4441 | 4462 | UGUAUCACAAUACAGGCUCCGCU | 796 |
| 1689022 | 68303 | 68324 | 4456 | 4477 | UACAUCGUUGACAGCAGUAUCAC | 797 |
| 1689025 | 68317 | 68338 | 4470 | 4491 | UCACUGGUGUUCAGCACAUCGUU | 798 |
| 1689031 | N/A | N/A | 4515 | 4536 | UCUUCAUUCUGAUCAUGAUCAGG | 799 |
| 1689037 | 113412 | 113433 | 4538 | 4559 | UGCAUUCUUCCCGGCAAUGAAAU | 800 |
| 1689040 | 113500 | 113521 | 4626 | 4647 | UUGAUGUUCCUCACAUGCUCAGG | 801 |
| 1689049 | 113534 | 113555 | 4660 | 4681 | UACAUCAGCAGCAGUAGCUUCAA | 802 |
| 1689052 | 113550 | 113571 | 4676 | 4697 | UGUCGUCAUAAGCCUCGACAUCA | 803 |
| 1689055 | 113581 | 113602 | 4707 | 4728 | UAGGUUGCGAAAGUCCGUUUGGU | 804 |
| 1689058 | 113596 | 113617 | 4722 | 4743 | UUGACAUCUUUCCCAAAGGUUGC | 805 |
| 1689064 | 113648 | 113669 | 4774 | 4795 | UUCGACAGUCCUCUUGCCUUUCA | 806 |
| 1689067 | 113656 | 113677 | 4782 | 4803 | UUGGUCACAUCGACAGUCCUCUU | 807 |
| 1689070 | 113782 | 113803 | 4908 | 4929 | UUGGUGUAAGACACGGAAGGCUU | 808 |
| 1689073 | 113783 | 113804 | 4909 | 4930 | UAUGGUGUAAGACACGGAAGGCU | 809 |
| 1689079 | 113839 | 113860 | 4965 | 4986 | UCAUUGUUGACAUUGUUGACAUA | 810 |
| 1689082 | 113849 | 113870 | 4975 | 4996 | UCGAGUAGGGCCAUUGUUGACAU | 811 |
| 1689088 | 113906 | 113927 | 5032 | 5053 | UCUGACCUCAUGCAUGACUUUCU | 812 |
| 1689094 | 113938 | 113959 | 5064 | 5085 | UACUCUUUGUUGCGACCUUCCUU | 813 |
| 1689100 | 113965 | 113986 | 5091 | 5112 | UUAUCCUUCAGACGCUUCACACC | 814 |
| 1689103 | 113980 | 114001 | 5106 | 5127 | UUGGUUUAGAGAACGAUAUCCUU | 815 |
| 1689109 | 114010 | 114031 | 5136 | 5157 | UGUGUGGUUUCUUUCUCUUCUUC | 816 |
| 1689112 | 114024 | 114045 | 5150 | 5171 | UUUCUUCACUAGCCAGUGUGGUU | 817 |
| 1689115 | 114039 | 114060 | 5165 | 5186 | UACAAGAAGCUCCUGCUUCUUCA | 818 |
| 1689121 | 114069 | 114090 | 5195 | 5216 | UUCAAGAACCAACCAUUGGUGAG | 819 |
| 1689127 | 114099 | 114120 | 5225 | 5246 | UCAUUUAGGAAAAGCUCUGAAAU | 820 |
| 1689133 | 114129 | 114150 | 5255 | 5276 | UUCACAGAAUGAUAAUCACCUAU | 821 |
| 1689142 | 114175 | 114196 | 5301 | 5322 | UUUUGCUCCAACUGAACACCCCU | 822 |
| 1689145 | 114190 | 114211 | 5316 | 5337 | UUCAAGCCAAAGCUAAUUUGCUC | 823 |
| 1689148 | 114202 | 114223 | 5328 | 5349 | UCCCAUGAACAACUCAAGCCAAA | 824 |
| 1689151 | 114213 | 114234 | 5339 | 5360 | UAACAUCAAGGCCCCAUGAACAA | 825 |
| 1689160 | 114258 | 114279 | 5384 | 5405 | UUUAAUACAUAAUACUUUUCACA | 826 |
| 1689163 | 114273 | 114294 | 5399 | 5420 | UUAUAAAUUCAAACACUUAAUAC | 827 |
| 1689172 | 114317 | 114338 | 5443 | 5464 | UACAAACAAUGGUAAUUUAUAUU | 828 |
| 1689181 | 114362 | 114383 | 5488 | 5509 | UAGAGCUUUUUUUUUUCACUUUU | 829 |
| 1689184 | 114377 | 114398 | 5503 | 5524 | UUUAUUAAAGGUGUCCAGAGCUU | 830 |
| 1689187 | 114392 | 114413 | 5518 | 5539 | UAAAACAGUGGCGAGCUUAUUAA | 831 |
| 1689190 | 114407 | 114428 | 5533 | 5554 | UUUGUCUACACUACAAAAAACAG | 832 |
| 1689193 | 114422 | 114443 | 5548 | 5569 | UUAAAUGACCAUUAACUUGUCUA | 833 |
| 1689196 | 114437 | 114458 | 5563 | 5584 | UAUGAAUAGUACACAAUAAAUGA | 834 |
| 1689205 | 114482 | 114503 | 5608 | 5629 | UUUCAGAAACAACCUUUUGGGGG | 835 |
| 1689211 | 114511 | 114532 | 5637 | 5658 | UAAAGUAGCGGCAUUGGGAAGUA | 836 |
| 1689217 | 114549 | 114570 | 5675 | 5696 | UGCUAGCAAAAGGGUUUUUAAAG | 837 |
| 1689220 | 114564 | 114585 | 5690 | 5711 | UUACAACAAUAGCACAGCUAGCA | 838 |
| 1689223 | 114579 | 114600 | 5705 | 5726 | UAUUUGCAAUAUCAAAUACAACA | 839 |
| 1689226 | 114594 | 114615 | 5720 | 5741 | UACCACACACAUAGCAAUUUGCA | 840 |
| 1689229 | 114609 | 114630 | 5735 | 5756 | UAAGCCUUUUGCCAUCACCACAC | 841 |
| 1689232 | 114624 | 114645 | 5750 | 5771 | UAACACCAACUUUUAAAAGCCUU | 842 |
| 1689241 | 114669 | 114690 | 5795 | 5816 | UACUUUGUUUUUGUCUGUAGUUU | 843 |
| 1689250 | 114714 | 114735 | 5840 | 5861 | UUAUAUGCAUGGUGUUGCUCAUU | 844 |
| 1689253 | 114729 | 114750 | 5855 | 5876 | UUCCAAGUACUCAAUCUAUAUGC | 845 |
| 1689256 | 114744 | 114765 | 5870 | 5891 | UAAAACGUGAGUAUUCUCCAAGU | 846 |
| 1689262 | 114774 | 114795 | 5900 | 5921 | UAAAGUGGUGAGCAAUCACUACA | 847 |
| 1689265 | 114789 | 114810 | 5915 | 5936 | UGGAAAAAUACUUUGCAAAGUGG | 848 |
| 1689268 | 114804 | 114825 | 5930 | 5951 | UGACCACUGAAAGGCAGGAAAAA | 849 |
| 1689271 | 114805 | 114826 | 5931 | 5952 | UAGACCACUGAAAGGCAGGAAAA | 850 |
| 1689274 | 114826 | 114847 | 5952 | 5973 | UUGAUCUAUCAUGGACCUGGGCA | 851 |
| 1689277 | 114841 | 114862 | 5967 | 5988 | UAAUGACUUUCUGCAAUGAUCUA | 852 |
| 1689283 | 114871 | 114892 | 5997 | 6018 | UAACUGCAAAUUAGAUAGCAGCC | 853 |
| 1689286 | 114886 | 114907 | 6012 | 6033 | UCACAGUAUUUCUGACAACUGCA | 854 |
| 1689289 | 114901 | 114922 | 6027 | 6048 | UUCAUAAAACUUUCAGCACAGUA | 855 |
| 1689292 | 114916 | 114937 | 6042 | 6063 | UUUUAAAAGAUGGAUGUCAUAAA | 856 |
| 1689295 | 114931 | 114952 | 6057 | 6078 | UUUCAGGGCCUGAAAAUUUAAAA | 857 |
| 1689298 | 114940 | 114961 | 6066 | 6087 | UACUUUCCUGUUCAGGGCCUGAA | 858 |
| 1689301 | 114955 | 114976 | 6081 | 6102 | UAUAACUUCAGGAGCAACUUUCC | 859 |
| 1689313 | 115015 | 115036 | 6141 | 6162 | UUAGAUUCAGUCAUCUUCAAUUU | 860 |
| 1689316 | 115030 | 115051 | 6156 | 6177 | UAUUUAGAUCUUAAAAUAGAUUC | 861 |
| 1689319 | 115045 | 115066 | 6171 | 6192 | UUCUGAAGAGAUGCUAAUUUAGA | 862 |
| 1689322 | 115060 | 115081 | 6186 | 6207 | UAUCAGGAAGUGUGUGUCUGAAG | 863 |
| 1689325 | 115075 | 115096 | 6201 | 6222 | UAUUGGGAAACACUGAAUCAGGA | 864 |
| 1689334 | 115108 | 115129 | 6234 | 6255 | UCAUGACGUGCUUUGCAGUCUAA | 865 |
| 1689337 | 115131 | 115152 | 6257 | 6278 | UACAUGGAGUUCUCAAUCCCAGC | 866 |
| 1689340 | 115146 | 115167 | 6272 | 6293 | UCUAAGAUACAGAGCAACAUGGA | 867 |
| 1689343 | 115161 | 115182 | 6287 | 6308 | UCCUACGUAUAUAAGCCUAAGAU | 868 |
| 1689349 | 115191 | 115212 | 6317 | 6338 | UAAAUAUACACUUUGUACUGCUU | 869 |
| 1689355 | 115221 | 115242 | 6347 | 6368 | UGAUGCUGUUACCUGUUACCUGU | 870 |
| 1689358 | 115236 | 115257 | 6362 | 6383 | UAGUAAUUGGAUUAGCGAUGCUG | 871 |
| 1689364 | 115266 | 115287 | 6392 | 6413 | UAGUGUCUGAGUGUCUCCGUUUA | 872 |
| 1689370 | 115296 | 115317 | 6422 | 6443 | UAAAACUAUUAGUCAUAAAAAGA | 873 |
| 1689379 | 115341 | 115362 | 6467 | 6488 | UAAAGGAUUUUUAUUUUAGUAUU | 874 |
| 1689382 | 115356 | 115377 | 6482 | 6503 | UGAGUUGGCUAAAUCGAAAGGAU | 875 |
| 1689388 | 115386 | 115407 | 6512 | 6533 | UAAAGGGUGUAUUCCUAGCCUAC | 876 |
| 1689391 | 115401 | 115422 | 6527 | 6548 | UAGUGUGUUAAUUUAAAAAGGGU | 877 |
| 1689394 | 115416 | 115437 | 6542 | 6563 | UAAAAAAAGGAUCUACAGUGUGU | 878 |
| 1689397 | 115431 | 115452 | 6557 | 6578 | UGGAAUGUUAAAACAGAAAAAAA | 879 |
| 1689400 | 115446 | 115467 | 6572 | 6593 | UAAUGGGGGAGUUAGAGGAAUGU | 880 |
| 1689412 | 115506 | 115527 | 6632 | 6653 | UAUGAACUCUUAGGCUGCAAAAA | 881 |
| 1689415 | 115521 | 115542 | 6647 | 6668 | UGUUUAUUUUUAAAUAAUGAACU | 882 |
| 1689418 | 115536 | 115557 | 6662 | 6683 | UUGACAUAUUUCUUUAGUUUAUU | 883 |
| 1689421 | 115551 | 115572 | 6677 | 6698 | UAAGGCAGAACAAAGGUGACAUA | 884 |
| 1689424 | 115566 | 115587 | 6692 | 6713 | UAACUCUCUUAAGACCAAGGCAG | 885 |
| 1689430 | 115596 | 115617 | 6722 | 6743 | UCAGAACCAUAAAACUUGUUUCU | 886 |
| 1689433 | 115611 | 115632 | 6737 | 6758 | UUGAAACAAAUGAAAACAGAACC | 887 |
| 1689436 | 115626 | 115647 | 6752 | 6773 | UCUGAAUUUCAAAAAAUGAAACA | 888 |
| 1689448 | 115686 | 115707 | 6812 | 6833 | UAAAAUAAAUCCUCUUUUGCAUU | 889 |
| 1689454 | 115716 | 115737 | 6842 | 6863 | UAAAGAGCUGACUUAUCUACCUA | 890 |
| 1689457 | 115731 | 115752 | 6857 | 6878 | UUAAGUAAAACAUUCAAAAGAGC | 891 |
| 1689460 | 115746 | 115767 | 6872 | 6893 | UGAACUCAGGCAAAAAUAAGUAA | 892 |
| 1689466 | 115776 | 115797 | 6902 | 6923 | UGAAAAUAUUCCUAGUAAUGCGU | 893 |
| 1689475 | 115853 | 115874 | 6979 | 7000 | UAAUGUUCUCCCCUACCUAACCC | 894 |
| 1689484 | 115898 | 115919 | 7024 | 7045 | UGAAAUAAGGAUGGAUUUGUAGC | 895 |
| 1689487 | 115913 | 115934 | 7039 | 7060 | UUUCAGCACUGAAUAAGAAAUAA | 896 |
| 1689493 | 115943 | 115964 | 7069 | 7090 | UAGCCACACCAAUAUUUUGCAUG | 897 |
| 1689505 | 116003 | 116024 | 7129 | 7150 | UAAAAAUGAAGAUGUUAUGGUAA | 898 |
| 1689508 | 116018 | 116039 | 7144 | 7165 | UGGCAAUGAAAUGAGGAAAAAUG | 899 |
| 1689511 | 116033 | 116054 | 7159 | 7180 | UGAAAACUGUAUGAGAGGCAAUG | 900 |
| 1689514 | 116048 | 116069 | 7174 | 7195 | UAAUAAAUCAGAGGGAGAAAACU | 901 |
| 1689520 | 116078 | 116099 | 7204 | 7225 | UUACUUAAUUCAAAAUCCACUAC | 902 |
| 1689526 | 116108 | 116129 | 7234 | 7255 | UAUCAAAUAGUCACUUGCAAAGA | 903 |
| 1689529 | 116123 | 116144 | 7249 | 7270 | UAUUUUUAAUGUGUUAAUCAAAU | 904 |
| 1689532 | 116138 | 116159 | 7264 | 7285 | UGGAAAUUUUUAAAAAAUUUUUA | 905 |
| 1689535 | 116153 | 116174 | 7279 | 7300 | UAUCAUAACUUAAAGGGGAAAUU | 906 |
| 1689538 | 116168 | 116189 | 7294 | 7315 | UAUUCUAUAGGCAGCCAUCAUAA | 907 |
| 1689541 | 116183 | 116204 | 7309 | 7330 | UUGAGAAACAGUCUAAAUUCUAU | 908 |
| 1689547 | 116213 | 116234 | 7339 | 7360 | UCUAAUAACAUAAUAUCAGGAUG | 909 |
| 1689550 | 116228 | 116249 | 7354 | 7375 | UACCUUGAAAUCGUAGCUAAUAA | 910 |
| 1689553 | 116243 | 116264 | 7369 | 7390 | UUCUGACUUCAAAGUGACCUUGA | 911 |
| 1689556 | 116258 | 116279 | 7384 | 7405 | UUAGAAAACUGUGAAGUCUGACU | 912 |
| 1689559 | 116273 | 116294 | 7399 | 7420 | UCAAGAAAUACACCUGUAGAAAA | 913 |
| 1689565 | 116289 | 116310 | 7415 | 7436 | UUUCCCACUGAGCAUAGCAAGAA | 914 |
| 1689568 | 116307 | 116328 | 7433 | 7454 | UAUCUUUUCUGCUCCCUGGUUCC | 915 |
| 1689571 | 116322 | 116343 | 7448 | 7469 | UUUCCCACUUUCCACAAUCUUUU | 916 |
| 1689574 | 116337 | 116358 | 7463 | 7484 | UACGUGACAAUUAAUGUUCCCAC | 917 |
| 1689577 | 116347 | 116368 | 7473 | 7494 | UCUCAACAGCCACGUGACAAUUA | 918 |
| 1689580 | 116389 | 116410 | 7515 | 7536 | UAACUUGGCUGGUAAGAGGCAUG | 919 |
| 1689583 | 116404 | 116425 | 7530 | 7551 | UACUCUAACCAUUUAAAACUUGG | 920 |
| 1689586 | 116419 | 116440 | 7545 | 7566 | UAUCAAUGCCAAUGCCACUCUAA | 921 |
| 1689589 | 116434 | 116455 | 7560 | 7581 | UCAAGAGAAAAGCAAAAUCAAUG | 922 |
| 1689592 | 116449 | 116470 | 7575 | 7596 | UGAAAUGAAGAAAACCCAAGAGA | 923 |
| 1689595 | 116464 | 116485 | 7590 | 7611 | UGAUGAAUUAUGAAAAGAAAUGA | 924 |
| 1689598 | 116479 | 116500 | 7605 | 7626 | UGAUCUAUAGCUUGAAGAUGAAU | 925 |
| 1689601 | 116494 | 116515 | 7620 | 7641 | UUAGGGAAGAAGGAUGGAUCUAU | 926 |
| 1689604 | 116509 | 116530 | 7635 | 7656 | UAACAAAGUAUUUGGAUAGGGAA | 927 |
| 1689610 | 116538 | 116559 | 7664 | 7685 | UAAGCCAAAAAAAUCUGACUGCC | 928 |
| 1689613 | 116552 | 116573 | 7678 | 7699 | UUCAGUGAGGUUUGGAAGCCAAA | 929 |
| 1689616 | 116567 | 116588 | 7693 | 7714 | UAUUCUCUGAACAUGCUCAGUGA | 930 |
| 1689625 | 116612 | 116633 | 7738 | 7759 | UAUACAUCAGACAAUUGUGGGGA | 931 |
| 1689628 | 116627 | 116648 | 7753 | 7774 | UCUUCUGAGAGGACUCAUACAUC | 932 |
| 1689631 | 116642 | 116663 | 7768 | 7789 | UUAGUAUGCACUUGUGCUUCUGA | 933 |
| 1689634 | 116657 | 116678 | 7783 | 7804 | UUUUACAAAGCCUUCCUAGUAUG | 934 |
| 1689637 | 116672 | 116693 | 7798 | 7819 | UUGCCUACAAAACCAGUUUACAA | 935 |
| 1689643 | 116693 | 116714 | 7819 | 7840 | UUGCCUAUUUGCAGGUACAGCCU | 936 |
| 1689646 | 116708 | 116729 | 7834 | 7855 | UGAUCCUUGCUCAGAAUGCCUAU | 937 |
| 1689649 | 116723 | 116744 | 7849 | 7870 | UCAAAGGGAAAUUUAGGAUCCUU | 938 |
| 1689652 | 116733 | 116754 | 7859 | 7880 | UGGACAUGAGCCAAAGGGAAAUU | 939 |
| 1689655 | 116768 | 116789 | 7894 | 7915 | UCAUGCCAAAAAGGAGAAGGUGG | 940 |
| 1689658 | 116783 | 116804 | 7909 | 7930 | UUAGCUUUUCACCAGACAUGCCA | 941 |
| 1689661 | 116797 | 116818 | 7923 | 7944 | UCCCUGUGAACCUUGUAGCUUUU | 942 |
| 1689664 | 116812 | 116833 | 7938 | 7959 | UAGGGAGAAUAUUUGGCCCUGUG | 943 |
| 1689667 | 116827 | 116848 | 7953 | 7974 | UUGUUUAGAGAACAAAAGGGAGA | 944 |
| 1689670 | 116842 | 116863 | 7968 | 7989 | UUUUAUGUGUGCAACAUGUUUAG | 945 |
| 1689673 | 116857 | 116878 | 7983 | 8004 | UAAUCACUCCCUUGAGUUUAUGU | 946 |
| 1689676 | 116872 | 116893 | 7998 | 8019 | UGGACUUAGGAACCGAAAUCACU | 947 |
| 1689679 | 116887 | 116908 | 8013 | 8034 | UGAAUAGAACUCCCUAGGACUUA | 948 |
| 1689682 | 116902 | 116923 | 8028 | 8049 | UACAUCAGAAUAAAUGGAAUAGA | 949 |
| 1689685 | 116917 | 116938 | 8043 | 8064 | UUCCUCCUUAAAAGGGACAUCAG | 950 |
| 1689688 | 116932 | 116953 | 8058 | 8079 | UCACUUCAACACCAACUCCUCCU | 951 |
| 1689703 | 117007 | 117028 | 8133 | 8154 | UCCUUAGGUGCAAUUUUGGAUGA | 952 |
| 1689709 | 117037 | 117058 | 8163 | 8184 | UACUAAGCGAACAAUUUUGUCUA | 953 |
| 1689715 | 117067 | 117088 | 8193 | 8214 | UAAAAUAUUUCUGAUUAGAGAUC | 954 |
| 1689730 | 117137 | 117158 | 8263 | 8284 | UCUGAAGUAACACUAUCAAGAUG | 955 |
| 1689733 | 117152 | 117173 | 8278 | 8299 | UUCAGUCAGUCAUAUGCUGAAGU | 956 |
| 1689736 | 117167 | 117188 | 8293 | 8314 | UACUCCCUUCAUAAAAUCAGUCA | 957 |
| 1689739 | 117182 | 117203 | 8308 | 8329 | UGGAAAAGUCAGCUAAACUCCCU | 958 |
| 1689745 | 117212 | 117233 | 8338 | 8359 | UCUUUUUGUUUUUAAUAUGAUAG | 959 |
| 1689751 | 117240 | 117261 | 8366 | 8387 | UCUUUGUCCUUGCUGCUUCAAGU | 960 |
| 1689760 | 117314 | 117335 | 8440 | 8461 | UUACAAUAAUAAUCCUUUUCCAC | 961 |
| 1689763 | 117329 | 117350 | 8455 | 8476 | UAGAACUGCUAUUAUGUACAAUA | 962 |
| 1689766 | 117344 | 117365 | 8470 | 8491 | UAUUGGAAUUCCAGCCAGAACUG | 963 |
| 1689769 | 117359 | 117380 | 8485 | 8506 | UAUCCCCAGAAAGUGGAUUGGAA | 964 |
| 1689772 | 117374 | 117395 | 8500 | 8521 | UUUCAACAUCAAAAUGAUCCCCA | 965 |
| 1689775 | 117389 | 117410 | 8515 | 8536 | UUGCUUUGGGGGAACAUUCAACA | 966 |
| 1689778 | 117404 | 117425 | 8530 | 8551 | UCCAAACUUGUCAGAAUGCUUUG | 967 |
| 1689787 | 117449 | 117470 | 8575 | 8596 | UAAAGUCAAUAAGGGUCUUAUUA | 968 |
| 1689793 | 117479 | 117500 | 8605 | 8626 | UAUUUCUUAAGCUCAUUUAUGCC | 969 |
| 1689796 | 117494 | 117515 | 8620 | 8641 | UGACUGUAUACAAUGGAUUUCUU | 970 |
| 1689799 | 117509 | 117530 | 8635 | 8656 | UGAAGGCAAACACUAGGACUGUA | 971 |
| 1689802 | 117524 | 117545 | 8650 | 8671 | UAUGUAAUUUUACCAAGAAGGCA | 972 |
| 1689805 | 117539 | 117560 | 8665 | 8686 | UAAAUGACAUCCUUAAAUGUAAU | 973 |
| 1689814 | 117584 | 117605 | 8710 | 8731 | UACAUCUCAAUACACUUCAGUGU | 974 |
| 1689817 | 117599 | 117620 | 8725 | 8746 | UUUAAACUAAAGAACAACAUCUC | 975 |
| 1689823 | 117629 | 117650 | 8755 | 8776 | UAUCCCCUUUGAAUAUUACUUUG | 976 |
| 1689826 | 117638 | 117659 | 8764 | 8785 | UCCCCCAAACAUCCCCUUUGAAU | 977 |
| 1689829 | 117668 | 117689 | 8794 | 8815 | UUCAAUAUAAAGCCACCCGGUCC | 978 |
| 1689832 | 117683 | 117704 | 8809 | 8830 | UUGGAAUAUUUCAUUAUCAAUAU | 979 |
| 1689835 | 117698 | 117719 | 8824 | 8845 | UCAAUGUGUUUUGCUCUGGAAUA | 980 |
| 1689838 | 117713 | 117734 | 8839 | 8860 | UACAACUUCAUUAGGACAAUGUG | 981 |
| 1689841 | 117728 | 117749 | 8854 | 8875 | UACGAAGAGAGCUGCAACAACUU | 982 |
| 1689844 | 117741 | 117762 | 8867 | 8888 | UGCGGCACAAGAAAACGAAGAGA | 983 |
| 1689847 | 117749 | 117770 | 8875 | 8896 | UCAAUUCCAGCGGCACAAGAAAA | 984 |
| 1689850 | 117763 | 117784 | 8889 | 8910 | UAGUGACCCACAAGCCAAUUCCA | 985 |
| 1689856 | 117793 | 117814 | 8919 | 8940 | UUAUUUGAAAUUAAUUCACUUUU | 986 |
| 1689859 | 117808 | 117829 | 8934 | 8955 | UAAGCAAUAUGAUUCCUAUUUGA | 987 |
| 1689865 | 117838 | 117859 | 8964 | 8985 | UACAAGGUGGUAAAUUUUCUUUG | 988 |
| 1689868 | 117853 | 117874 | 8979 | 9000 | UCAAUCUAUGUAUCAGACAAGGU | 989 |
| 1689877 | 117898 | 117919 | 9024 | 9045 | UUCAAGAUCAGGUGUUUGUGGGU | 990 |
| 1689880 | 117913 | 117934 | 9039 | 9060 | UUACAAUGCUUUCCAAUCAAGAU | 991 |
| 1689883 | 117928 | 117949 | 9054 | 9075 | UUUUUCCCUAAUGACCUACAAUG | 992 |
| 1689886 | 117943 | 117964 | 9069 | 9090 | UAGUCAGCAUCAUCAGUUUUCCC | 993 |
| 1689892 | 117966 | 117987 | 9092 | 9113 | UAUUGCCAACACAGCUGGAGCAA | 994 |
| 1689895 | 117981 | 118002 | 9107 | 9128 | UACAAGGUCAUCUUGAAUUGCCA | 995 |
| 1689898 | 117996 | 118017 | 9122 | 9143 | UAACUUUCAGUUAGUAACAAGGU | 996 |
| 1689904 | 118026 | 118047 | 9152 | 9173 | UUUAGCUGGUUUGUUUGCUAAGG | 997 |
| 1689907 | 118041 | 118062 | 9167 | 9188 | UAGUGCUGUAAUGGUGUUAGCUG | 998 |
| 1689910 | 118056 | 118077 | 9182 | 9203 | UAAAAUCUACUUAACCAGUGCUG | 999 |
| 1689913 | 118071 | 118092 | 9197 | 9218 | UCAGCCAGUGCCAGUAAAAAUCU | 1000 |
| 1689919 | 118111 | 118132 | 9237 | 9258 | UGUCAUUAAAGUCUGUAUCCUAG | 1001 |
| 1689922 | 118126 | 118147 | 9252 | 9273 | UCUAGUCUGGCUCUUGGUCAUUA | 1002 |
| 1689928 | 118156 | 118177 | 9282 | 9303 | UGAGGUAUUUGUUGCUGAUUUCU | 1003 |
| 1689931 | 118171 | 118192 | 9297 | 9318 | UUUCAAAUAGCACAAGGAGGUAU | 1004 |
| 1689934 | 118186 | 118207 | 9312 | 9333 | UACUAAUACCUUAGCAUUCAAAU | 1005 |
| 1689937 | 118201 | 118222 | 9327 | 9348 | UCGUAAGCCUAUUGCAACUAAUA | 1006 |
| 1689940 | 118205 | 118226 | 9331 | 9352 | UAAGGCGUAAGCCUAUUGCAACU | 1007 |
| 1689943 | 118242 | 118263 | 9368 | 9389 | UUAGUGUCAUCAGGCUCAUUCCC | 1008 |
| 1689946 | 118257 | 118278 | 9383 | 9404 | UACAGGUAAACAGUAAUAGUGUC | 1009 |
| 1689958 | 118317 | 118338 | 9443 | 9464 | UCAGAGACUGCUUAAUGAGACAU | 1010 |
| 1689967 | 118362 | 118383 | 9488 | 9509 | UUACAGAUCAGCAUAUACAACAA | 1011 |
| 1689970 | 118377 | 118398 | 9503 | 9524 | UAAAAUGUACAUAACAUACAGAU | 1012 |
| 1689979 | 118422 | 118443 | 9548 | 9569 | UAUUCUUUUUUGUCUUUUUUCUU | 1013 |
| 1689982 | 118437 | 118458 | 9563 | 9584 | UAAAUAGACAGUGGUGAUUCUUU | 1014 |
| 1689985 | 118452 | 118473 | 9578 | 9599 | UUUUAUCAUCUUCAUAAAAUAGA | 1015 |
| 1689988 | 118467 | 118488 | 9593 | 9614 | UAUUUAAUAAAGCUGCUUUAUCA | 1016 |
| 1689991 | 118482 | 118503 | 9608 | 9629 | UAACAUAACUGUAAUAAUUUAAU | 1017 |
| 1689994 | 118497 | 118518 | 9623 | 9644 | UGAUAACACCAUUUGAAACAUAA | 1018 |
| 1689997 | 118512 | 118533 | 9638 | 9659 | UGGAAACAAUGUGGCAGAUAACA | 1019 |
| 1690000 | 118527 | 118548 | 9653 | 9674 | UAACCACCAGAUAAAAGGAAACA | 1020 |
| 1690003 | 118537 | 118558 | 9663 | 9684 | UGGAAACAGAGAACCACCAGAUA | 1021 |
| 1690006 | 118552 | 118573 | 9678 | 9699 | UAACACAUUUAAAGGGGGAAACA | 1022 |
| 1690012 | 118582 | 118603 | 9708 | 9729 | UUAAAAUGCAUUAAAUUUUUGAA | 1023 |
| 1690018 | 114806 | 114827 | 5932 | 5953 | UCAGACCACUGAAAGGCAGGAAA | 1024 |
| 1690021 | 115835 | 115856 | 6961 | 6982 | UACCCCAUCCCUACUGCCUUACC | 1025 |
| 1690024 | 116763 | 116784 | 7889 | 7910 | UCAAAAAGGAGAAGGUGGGGUGG | 1026 |
| 1690027 | 117647 | 117668 | 8773 | 8794 | UCCAGCCCCACCCCCAAACAUCC | 1027 |
| 1690030 | 118230 | 118251 | 9356 | 9377 | UGCUCAUUCCCCUCACUAGAGGA | 1028 |

[0472] The sense RNAi oligonucleotide in each case is 21 nucleosides in length; has a sugar motif (from 5′ to 3′) of: yyyyyyfyfffyyyyyyyyyy; wherein “y” represents a 2′-O-methylribosyl sugar and the “f” represents a 2′-fluororibosyl sugar; and an internucleoside linkage motif (from 5′ to 3′) of: ssooooooooooooooooss; wherein ‘o’ represents a phosphodiester internucleoside linkage and ‘s’ represents a phosphorothioate internucleoside linkage. The sense RNAi oligonucleotides are listed below in Table 9.

[0473] Each antisense RNAi oligonucleotide is complementary to the target nucleic acid (PCDH19), and each sense RNAi oligonucleotides is complementary to the first of the 21 nucleosides of the antisense RNAi oligonucleotide (from 5′ to 3′) wherein the last two 3′-nucleosides of the antisense RNAi oligonucleotides are not paired with the sense RNAi oligonucleotide (are overhanging nucleosides). The sense RNAi oligonucleotides and siRNAs are listed in Table 9 below.

TABLE 9
Design of sense strand modified oligonucleotides of siRNAs targeted to human PCDH19

| | Antisense | Sense | | |
|---|---|---|---|---|
| Duplex | Strand | Strand | | SEQ |
| Compound | Compound | Compound | | ID |
| Number | No. | No. | Sense Strand Sequence (5′ to 3′) | NO |
| 1688314 | 1688312 | 1688313 | CUGAGCGAUUUCAUCCGAAAA | 1029 |
| 1688317 | 1688315 | 1688316 | CGAAAUCCUAAACCUCCUACA | 1030 |
| 1688320 | 1688318 | 1688319 | ACCUCCUACCCCAAACCCAUA | 1031 |
| 1688323 | 1688321 | 1688322 | ACAGACAGAGAAAGCGAGACA | 1032 |
| 1688326 | 1688324 | 1688325 | AGACAGAGAAAGCGAGACAGA | 1033 |
| 1688329 | 1688327 | 1688328 | UCUCCGGGAAGAUGAAAUCAA | 1034 |
| 1688332 | 1688330 | 1688331 | AAUCAAGACGCUCCUGCAAGA | 1035 |
| 1688335 | 1688333 | 1688334 | ACGCUCCUGCAAGUAAACUUA | 1036 |
| 1688338 | 1688336 | 1688337 | AACUUCGGCGGCGACAAAAUA | 1037 |
| 1688341 | 1688339 | 1688340 | UUAGAAAGACCGGGGCUUUGA | 1038 |
| 1688344 | 1688342 | 1688343 | CUUUGAUUUUCUUGGACAAAA | 1039 |
| 1688347 | 1688345 | 1688346 | UUGGACAAAUUGCCAUCUCCA | 1040 |
| 1688350 | 1688348 | 1688349 | UCUCCCCGUUUCCACAAACUA | 1041 |
| 1688353 | 1688351 | 1688352 | UCCACAAACUUGACGUGGAGA | 1042 |
| 1688356 | 1688354 | 1688355 | UCGGACUGCGUUGUUAACUUA | 1043 |
| 1688359 | 1688357 | 1688358 | AACUUUGAUUUCCUAGACGAA | 1044 |
| 1688362 | 1688360 | 1688361 | AUUUCCUAGACGAAAACGCCA | 1045 |
| 1688365 | 1688363 | 1688364 | UCUUUACCUUCGCCUCAAGUA | 1046 |
| 1688368 | 1688366 | 1688367 | ACCUUCGCCUCAAGUACUGUA | 1047 |
| 1688371 | 1688369 | 1688370 | GGCUAACUUUGAAGGGGUAAA | 1048 |
| 1688374 | 1688372 | 1688373 | AAGGGGUAAAACUGAGUAGCA | 1049 |
| 1688377 | 1688375 | 1688376 | CCGCCCUCAUUAAUCUCAAGA | 1050 |
| 1688380 | 1688378 | 1688379 | UCAAGUACUCGGUAGAAGAGA | 1051 |
| 1688383 | 1688381 | 1688382 | GUACUCGGUAGAAGAGGAGCA | 1052 |
| 1688386 | 1688384 | 1688385 | CCACACCUAGUGGACAUCAAA | 1053 |
| 1688389 | 1688387 | 1688388 | GUGGACAUCAAUCCCAGCUCA | 1054 |
| 1688392 | 1688390 | 1688391 | CUGGUCACCAAGCAGAAGAUA | 1055 |
| 1688395 | 1688393 | 1688394 | AAGAUUGACCGUGAUCUGCUA | 1056 |
| 1688398 | 1688396 | 1688397 | GAUUGACCGUGAUCUGCUGUA | 1057 |
| 1688401 | 1688399 | 1688400 | GUCAUGUCCAGCUCAAUGGAA | 1058 |
| 1688404 | 1688402 | 1688403 | AUGGAAAUCUGCGUGAUAAAA | 1059 |
| 1688407 | 1688405 | 1688406 | AUAAAGGUGGAGAUCAAGGAA | 1060 |
| 1688410 | 1688408 | 1688409 | CAAGGACCUGAACGACAAUGA | 1061 |
| 1688413 | 1688411 | 1688412 | ACGAUCCAGACUCAGGAAGCA | 1062 |
| 1688416 | 1688414 | 1688415 | GAUCCAGACUCAGGAAGCUUA | 1063 |
| 1688419 | 1688417 | 1688418 | UGCCGAACUCGUGGUGGAAAA | 1064 |
| 1688422 | 1688420 | 1688421 | CGUUGGCCUUAGUAUCAAGGA | 1065 |
| 1688425 | 1688423 | 1688424 | CAAGGUGACCGACUCCAAUGA | 1066 |
| 1688428 | 1688426 | 1688427 | CAAUGACAACAACCCGGUGUA | 1067 |
| 1688431 | 1688429 | 1688430 | GACAACAACCCGGUGUUUAGA | 1068 |
| 1688434 | 1688432 | 1688433 | GGUCUACUCCUUCUAUGGCUA | 1069 |
| 1688437 | 1688435 | 1688436 | CUUCUAUGGCUACGUCAACGA | 1070 |
| 1688440 | 1688438 | 1688439 | UGUCACUGGCGCUUUAGACUA | 1071 |
| 1688443 | 1688441 | 1688442 | UGGCGCUUUAGACUACGAAGA | 1072 |
| 1688446 | 1688444 | 1688445 | UGACAAUCCGCCGGUCAUCAA | 1073 |
| 1688449 | 1688447 | 1688448 | CAUCAACCUGCUGUCAGUCAA | 1074 |
| 1688452 | 1688450 | 1688451 | AGUCAACAGUGAGCUUGUGGA | 1075 |
| 1688455 | 1688453 | 1688454 | CCCUUUCGACUGCAGGAAUAA | 1076 |
| 1688458 | 1688456 | 1688457 | GAAUAUGAGAGCUUCUCCACA | 1077 |
| 1688461 | 1688459 | 1688460 | CUUCUCCACUAUUCUGGUGGA | 1078 |
| 1688464 | 1688462 | 1688463 | CACGACCAAUACAACCUCACA | 1079 |
| 1688467 | 1688465 | 1688466 | CAACCUCACAAUUCAGGCACA | 1080 |
| 1688470 | 1688468 | 1688469 | AGUCCUUUACCGUGCUCAUCA | 1081 |
| 1688473 | 1688471 | 1688472 | UCAUCACUGACGAAAAUGACA | 1082 |
| 1688476 | 1688474 | 1688475 | AUGACAACCACCCGCACUUUA | 1083 |
| 1688479 | 1688477 | 1688478 | UGACAACCACCCGCACUUUUA | 1084 |
| 1688482 | 1688480 | 1688481 | CUUUUCCAAGCCCUACUACCA | 1085 |
| 1688485 | 1688483 | 1688484 | CUACCAGGUCAUUGUGCAGGA | 1086 |
| 1688488 | 1688486 | 1688487 | AUUGUGCAGGAGAACAACACA | 1087 |
| 1688491 | 1688489 | 1688490 | CAUGCCUGUCUUCACCUAUGA | 1088 |
| 1688494 | 1688492 | 1688493 | CUAUGUCUCCAUCAAUCCCAA | 1089 |
| 1688497 | 1688495 | 1688496 | UCCCAACUCAGGCGACAUCUA | 1090 |
| 1688500 | 1688498 | 1688499 | CUACGCGCUGCGAUCCUUUAA | 1091 |
| 1688503 | 1688501 | 1688502 | CUUUAACCACGAGCAGACCAA | 1092 |
| 1688506 | 1688504 | 1688505 | GACCAAGGCGUUCGAAUUCAA | 1093 |
| 1688509 | 1688507 | 1688508 | CGAAUUCAAGGUGCUGGCCAA | 1094 |
| 1688512 | 1688510 | 1688511 | CAUCCUCGACGUCAACGACAA | 1095 |
| 1688515 | 1688513 | 1688514 | CACAGCCCCACCUCUGAUUAA | 1096 |
| 1688518 | 1688516 | 1688517 | AGGCUACCUGGUGACUGUUGA | 1097 |
| 1688521 | 1688519 | 1688520 | UGUUGUCAAGGCAGAAGACUA | 1098 |
| 1688524 | 1688522 | 1688523 | AGACUACGAUGAGGGCGAAAA | 1099 |
| 1688527 | 1688525 | 1688526 | ACUACGAUGAGGGCGAAAAUA | 1100 |
| 1688530 | 1688528 | 1688529 | CCGCGGCUUCUUUGAAAUAGA | 1101 |
| 1688533 | 1688531 | 1688532 | AAUAGACCAGGUCAAUGGCGA | 1102 |
| 1688536 | 1688534 | 1688535 | AGACCAGGUCAAUGGCGAAGA | 1103 |
| 1688539 | 1688537 | 1688538 | CCAAGUCCUCCUAUGAGCUUA | 1104 |
| 1688542 | 1688540 | 1688541 | UGAGCUUAUCGUGGUGGCUCA | 1105 |
| 1688545 | 1688543 | 1688544 | CUGCUCUCGUCCUAAUCUACA | 1106 |
| 1688548 | 1688546 | 1688547 | AUCUACUUGUCCCCUGCUCUA | 1107 |
| 1688551 | 1688549 | 1688550 | AGAGUCAAUGGGCUCUGUGAA | 1108 |
| 1688554 | 1688552 | 1688553 | UGUGAACUUGUCCUUGAUUUA | 1109 |
| 1688557 | 1688555 | 1688556 | GAUUUUCAUUAUUGCCCUGGA | 1110 |
| 1688560 | 1688558 | 1688559 | AUUAUUGCCCUGGGCUCCAUA | 1111 |
| 1688563 | 1688561 | 1688562 | UUGCGGGCAUCCUCUUUGUAA | 1112 |
| 1688566 | 1688564 | 1688565 | UUGUAACUAUGAUCUUCGUGA | 1113 |
| 1688569 | 1688567 | 1688568 | UUCGUGGCAAUCAAGUGCAAA | 1114 |
| 1688572 | 1688570 | 1688571 | UGCAAGCGAGACAACAAAGAA | 1115 |
| 1688575 | 1688573 | 1688574 | AAAGAGAUCCGGACCUACAAA | 1116 |
| 1688578 | 1688576 | 1688577 | UACAACUGCAGUAAUUGUUUA | 1117 |
| 1688581 | 1688579 | 1688580 | UGUUUAACCAUCACUUGUCUA | 1118 |
| 1688584 | 1688582 | 1688583 | UGUCUCCUCGGCUGUUUUAUA | 1119 |
| 1688587 | 1688585 | 1688586 | UUUAUAAAAGGACAAAACAGA | 1120 |
| 1688590 | 1688588 | 1688589 | AACAGCAAGUGUCUGCAUUGA | 1121 |
| 1688593 | 1688591 | 1688592 | UGCAUUGCAUCUCGGUUUCUA | 1122 |
| 1688596 | 1688594 | 1688595 | CUCGGUUUCUCCCAUUAGCGA | 1123 |
| 1688599 | 1688597 | 1688598 | UAGCGAGGAGCAAGACAAAAA | 1124 |
| 1688602 | 1688600 | 1688601 | CAAAAAGACAGAGGAGAAAGA | 1125 |
| 1688605 | 1688603 | 1688604 | GAAAGUGAGCCUAAGGGGAAA | 1126 |
| 1688608 | 1688606 | 1688607 | GGGAAAGAGAAUUGCUGAGUA | 1127 |
| 1688611 | 1688609 | 1688610 | GCUGAGUACUCCUAUGGGCAA | 1128 |
| 1688614 | 1688612 | 1688613 | GGGCAUCAAAAGAAAUCAAGA | 1129 |
| 1688617 | 1688615 | 1688616 | UCAAGCAAGAAGAAAAAAAUA | 1130 |
| 1688620 | 1688618 | 1688619 | AAAAUCAGUAAGAAUGACAUA | 1131 |
| 1688623 | 1688621 | 1688622 | AGAAUGACAUCCGCCUGGUAA | 1132 |
| 1688626 | 1688624 | 1688625 | UGUGGAGGAGACAGACAAGAA | 1133 |
| 1688946 | 1688944 | 1688945 | CAAGAUGAACGUUGUCAGUUA | 1134 |
| 1688949 | 1688947 | 1688948 | CGUUGUCAGUUGCUCUUCCCA | 1135 |
| 1688952 | 1688950 | 1688951 | GACCUCCUCCCUCAACUAUUA | 1136 |
| 1688955 | 1688953 | 1688954 | CUAUUUUGACUACCACCAGCA | 1137 |
| 1688958 | 1688956 | 1688957 | UUUGACUACCACCAGCAGACA | 1138 |
| 1688961 | 1688959 | 1688960 | UCUGAGAGCACUUUCCUGAAA | 1139 |
| 1688964 | 1688962 | 1688963 | CUGAAUGUGGAGAACCAGAAA | 1140 |
| 1688967 | 1688965 | 1688966 | UGUGGAGAACCAGAAUACCCA | 1141 |
| 1688970 | 1688968 | 1688969 | UACCCGCAACACCAGUGCUAA | 1142 |
| 1688973 | 1688971 | 1688972 | UGCUAACCACAUCUACCAUCA | 1143 |
| 1688976 | 1688974 | 1688975 | CCAUCACUCUUUCAACAGCCA | 1144 |
| 1688979 | 1688977 | 1688978 | CAUCACUCUUUCAACAGCCAA | 1145 |
| 1688982 | 1688980 | 1688981 | GCAGCCUGACCUGAUUAUCAA | 1146 |
| 1688985 | 1688983 | 1688984 | AUUAUCAACGGUGUGCCUCUA | 1147 |
| 1688988 | 1688986 | 1688987 | UCUGCCUGAGACUGAAAACUA | 1148 |
| 1688991 | 1688989 | 1688990 | AAACUAUUCUUUUGACUCCAA | 1149 |
| 1688994 | 1688992 | 1688993 | ACUCCAACUACGUGAAUAGCA | 1150 |
| 1688997 | 1688995 | 1688996 | AUAGCCGAGCCCAUUUAAUCA | 1151 |
| 1689000 | 1688998 | 1688999 | UAAUCAAGAGCAGCUCCACCA | 1152 |
| 1689003 | 1689001 | 1689002 | CUCCACCUUCAAGGACUUAGA | 1153 |
| 1689006 | 1689004 | 1689005 | CAAGGACUUAGAGGGCAACAA | 1154 |
| 1689009 | 1689007 | 1689008 | CAGCCUGAAGGAUAGUGGACA | 1155 |
| 1689012 | 1689010 | 1689011 | AGUGGACAUGAGGAGAGUGAA | 1156 |
| 1689015 | 1689013 | 1689014 | AGUGACCAAACUGACAGUGAA | 1157 |
| 1689018 | 1689016 | 1689017 | UGACAGUGAGCAUGAUGUCCA | 1158 |
| 1689021 | 1689019 | 1689020 | CGGAGCCUGUAUUGUGAUACA | 1159 |
| 1689024 | 1689022 | 1689023 | GAUACUGCUGUCAACGAUGUA | 1160 |
| 1689027 | 1689025 | 1689026 | CGAUGUGCUGAACACCAGUGA | 1161 |
| 1689030 | 1689028 | 1689029 | GGGAUCUCAGAUGCCUGAUCA | 1162 |
| 1689033 | 1689031 | 1689032 | UGAUCAUGAUCAGAAUGAAGA | 1163 |
| 1689036 | 1689034 | 1689035 | UGAAGGAUUUCAUUGCCGGGA | 1164 |
| 1689039 | 1689037 | 1689038 | UUCAUUGCCGGGAAGAAUGCA | 1165 |
| 1689042 | 1689040 | 1689041 | UGAGCAUGUGAGGAACAUCAA | 1166 |
| 1689045 | 1689043 | 1689044 | CAUCAUCGCGCUGUCUAUUGA | 1167 |
| 1689048 | 1689046 | 1689047 | UAUUGAAGCUACUGCUGCUGA | 1168 |
| 1689051 | 1689049 | 1689050 | GAAGCUACUGCUGCUGAUGUA | 1169 |
| 1689054 | 1689052 | 1689053 | AUGUCGAGGCUUAUGACGACA | 1170 |
| 1689057 | 1689055 | 1689056 | CAAACGGACUUUCGCAACCUA | 1171 |
| 1689060 | 1689058 | 1689059 | AACCUUUGGGAAAGAUGUCAA | 1172 |
| 1689063 | 1689061 | 1689062 | UGGGAAAGAUGUCAGCGACCA | 1173 |
| 1689066 | 1689064 | 1689065 | AAAGGCAAGAGGACUGUCGAA | 1174 |
| 1689069 | 1689067 | 1689068 | GAGGACUGUCGAUGUGACCAA | 1175 |
| 1689072 | 1689070 | 1689071 | GCCUUCCGUGUCUUACACCAA | 1176 |
| 1689075 | 1689073 | 1689074 | CCUUCCGUGUCUUACACCAUA | 1177 |
| 1689078 | 1689076 | 1689077 | UGAUCUGGAGCAGUAUGUCAA | 1178 |
| 1689081 | 1689079 | 1689080 | UGUCAACAAUGUCAACAAUGA | 1179 |
| 1689084 | 1689082 | 1689083 | GUCAACAAUGGCCCUACUCGA | 1180 |
| 1689087 | 1689085 | 1689086 | GAGCUGAUAGCGAGAAAGUCA | 1181 |
| 1689090 | 1689088 | 1689089 | AAAGUCAUGCAUGAGGUCAGA | 1182 |
| 1689093 | 1689091 | 1689092 | UUCUGAAGGAAGGUCGCAACA | 1183 |
| 1689096 | 1689094 | 1689095 | GGAAGGUCGCAACAAAGAGUA | 1184 |
| 1689099 | 1689097 | 1689098 | CAAAGAGUCCCCUGGUGUGAA | 1185 |
| 1689102 | 1689100 | 1689101 | UGUGAAGCGUCUGAAGGAUAA | 1186 |
| 1689105 | 1689103 | 1689104 | GGAUAUCGUUCUCUAAACCAA | 1187 |
| 1689108 | 1689106 | 1689107 | AACCAGUCUCCAGGAAGAAGA | 1188 |
| 1689111 | 1689109 | 1689110 | AGAAGAGAAAGAAACCACACA | 1189 |
| 1689114 | 1689112 | 1689113 | CCACACUGGCUAGUGAAGAAA | 1190 |
| 1689117 | 1689115 | 1689116 | AAGAAGCAGGAGCUUCUUGUA | 1191 |
| 1689120 | 1689118 | 1689119 | CUUGUUUUAAUUGCUCACCAA | 1192 |
| 1689123 | 1689121 | 1689122 | CACCAAUGGUUGGUUCUUGAA | 1193 |
| 1689126 | 1689124 | 1689125 | CUUGAGUGGCUAUAUUUCAGA | 1194 |
| 1689129 | 1689127 | 1689128 | UUCAGAGCUUUUCCUAAAUGA | 1195 |
| 1689132 | 1689130 | 1689131 | AAAUGUAUUGUUUAUAGGUGA | 1196 |
| 1689135 | 1689133 | 1689134 | AGGUGAUUAUCAUUCUGUGAA | 1197 |
| 1689138 | 1689136 | 1689137 | UGUGACAGUCCCUUGUUUCAA | 1198 |
| 1689141 | 1689139 | 1689140 | AGUCCCUUGUUUCAACAGGCA | 1199 |
| 1689144 | 1689142 | 1689143 | GGGUGUUCAGUUGGAGCAAAA | 1200 |
| 1689147 | 1689145 | 1689146 | GCAAAUUAGCUUUGGCUUGAA | 1201 |
| 1689150 | 1689148 | 1689149 | UGGCUUGAGUUGUUCAUGGGA | 1202 |
| 1689153 | 1689151 | 1689152 | GUUCAUGGGGCCUUGAUGUUA | 1203 |
| 1689156 | 1689154 | 1689155 | AUGUUGGGGAAACAGAGACAA | 1204 |
| 1689159 | 1689157 | 1689158 | AGACAAAUUCAGUUGUGAAAA | 1205 |
| 1689162 | 1689160 | 1689161 | UGAAAAGUAUUAUGUAUUAAA | 1206 |
| 1689165 | 1689163 | 1689164 | AUUAAGUGUUUGAAUUUAUAA | 1207 |
| 1689168 | 1689166 | 1689167 | UUAUAUAUUUUUCUAUGUCAA | 1208 |
| 1689171 | 1689169 | 1689170 | AUGUCAAAAUUAUAAUAUAAA | 1209 |
| 1689174 | 1689172 | 1689173 | UAUAAAUUACCAUUGUUUGUA | 1210 |
| 1689177 | 1689175 | 1689176 | UUUGUGGAGGAUUACAUUUAA | 1211 |
| 1689180 | 1689178 | 1689179 | AUUUAAAAAAGCAAAAAGUGA | 1212 |
| 1689183 | 1689181 | 1689182 | AAGUGAAAAAAAAAAGCUCUA | 1213 |
| 1689186 | 1689184 | 1689185 | GCUCUGGACACCUUUAAUAAA | 1214 |
| 1689189 | 1689187 | 1689188 | AAUAAGCUCGCCACUGUUUUA | 1215 |
| 1689192 | 1689190 | 1689191 | GUUUUUUGUAGUGUAGACAAA | 1216 |
| 1689195 | 1689193 | 1689194 | GACAAGUUAAUGGUCAUUUAA | 1217 |
| 1689198 | 1689196 | 1689197 | AUUUAUUGUGUACUAUUCAUA | 1218 |
| 1689201 | 1689199 | 1689200 | UUCAUUGAUUCAGUGAUGUGA | 1219 |
| 1689204 | 1689202 | 1689203 | AUGUGAAAUUGAGCCCCCAAA | 1220 |
| 1689207 | 1689205 | 1689206 | CCCAAAAGGUUGUUUCUGAAA | 1221 |
| 1689210 | 1689208 | 1689209 | CUGAAGCUCGAGUACUUCCCA | 1222 |
| 1689213 | 1689211 | 1689212 | CUUCCCAAUGCCGCUACUUUA | 1223 |
| 1689216 | 1689214 | 1689215 | GUGGACACCCCUGCUUUAAAA | 1224 |
| 1689219 | 1689217 | 1689218 | UUAAAAACCCUUUUGCUAGCA | 1225 |
| 1689222 | 1689220 | 1689221 | CUAGCUGUGCUAUUGUUGUAA | 1226 |
| 1689225 | 1689223 | 1689224 | UUGUAUUUGAUAUUGCAAAUA | 1227 |
| 1689228 | 1689226 | 1689227 | CAAAUUGCUAUGUGUGUGGUA | 1228 |
| 1689231 | 1689229 | 1689230 | GUGGUGAUGGCAAAAGGCUUA | 1229 |
| 1689234 | 1689232 | 1689233 | GGCUUUUAAAAGUUGGUGUUA | 1230 |
| 1689237 | 1689235 | 1689236 | GUGUUUUCUUUUUCUUAAAAA | 1231 |
| 1689240 | 1689238 | 1689239 | UAAAAAAAUAAUAAAACUACA | 1232 |
| 1689243 | 1689241 | 1689242 | ACUACAGACAAAAACAAAGUA | 1233 |
| 1689246 | 1689244 | 1689245 | AAAGUGCAAACAACUGAGACA | 1234 |
| 1689249 | 1689247 | 1689248 | GAGACAGCAAAUGAAUGAGCA | 1235 |
| 1689252 | 1689250 | 1689251 | UGAGCAACACCAUGCAUAUAA | 1236 |
| 1689255 | 1689253 | 1689254 | AUAUAGAUUGAGUACUUGGAA | 1237 |
| 1689258 | 1689256 | 1689257 | UUGGAGAAUACUCACGUUUUA | 1238 |
| 1689261 | 1689259 | 1689260 | GUUUUUUAACUCAUGUAGUGA | 1239 |
| 1689264 | 1689262 | 1689263 | UAGUGAUUGCUCACCACUUUA | 1240 |
| 1689267 | 1689265 | 1689266 | ACUUUGCAAAGUAUUUUUCCA | 1241 |
| 1689270 | 1689268 | 1689269 | UUUCCUGCCUUUCAGUGGUCA | 1242 |
| 1689273 | 1689271 | 1689272 | UUCCUGCCUUUCAGUGGUCUA | 1243 |
| 1689276 | 1689274 | 1689275 | CCCAGGUCCAUGAUAGAUCAA | 1244 |
| 1689279 | 1689277 | 1689278 | GAUCAUUGCAGAAAGUCAUUA | 1245 |
| 1689282 | 1689280 | 1689281 | UCAUUUUUGGAUAGGCUGCUA | 1246 |
| 1689285 | 1689283 | 1689284 | CUGCUAUCUAAUUUGCAGUUA | 1247 |
| 1689288 | 1689286 | 1689287 | CAGUUGUCAGAAAUACUGUGA | 1248 |
| 1689291 | 1689289 | 1689290 | CUGUGCUGAAAGUUUUAUGAA | 1249 |
| 1689294 | 1689292 | 1689293 | UAUGACAUCCAUCUUUUAAAA | 1250 |
| 1689297 | 1689295 | 1689296 | UUAAAUUUUCAGGCCCUGAAA | 1251 |
| 1689300 | 1689298 | 1689299 | CAGGCCCUGAACAGGAAAGUA | 1252 |
| 1689303 | 1689301 | 1689302 | AAAGUUGCUCCUGAAGUUAUA | 1253 |
| 1689306 | 1689304 | 1689305 | GUUAUGUUUCCAGGCUUAGAA | 1254 |
| 1689309 | 1689307 | 1689308 | UUAGAAAUUCCCUCUCUCCAA | 1255 |
| 1689312 | 1689310 | 1689311 | CUCCAAUCAUCUAAAAUUGAA | 1256 |
| 1689315 | 1689313 | 1689314 | AUUGAAGAUGACUGAAUCUAA | 1257 |
| 1689318 | 1689316 | 1689317 | AUCUAUUUUAAGAUCUAAAUA | 1258 |
| 1689321 | 1689319 | 1689320 | UAAAUUAGCAUCUCUUCAGAA | 1259 |
| 1689324 | 1689322 | 1689323 | UCAGACACACACUUCCUGAUA | 1260 |
| 1689327 | 1689325 | 1689326 | CUGAUUCAGUGUUUCCCAAUA | 1261 |
| 1689330 | 1689328 | 1689329 | CCAAUCAUGAUUAGAAUUAGA | 1262 |
| 1689333 | 1689331 | 1689332 | AUUAGACUGCAAAGCACGUCA | 1263 |
| 1689336 | 1689334 | 1689335 | AGACUGCAAAGCACGUCAUGA | 1264 |
| 1689339 | 1689337 | 1689338 | UGGGAUUGAGAACUCCAUGUA | 1265 |
| 1689342 | 1689340 | 1689341 | CAUGUUGCUCUGUAUCUUAGA | 1266 |
| 1689345 | 1689343 | 1689344 | CUUAGGCUUAUAUACGUAGGA | 1267 |
| 1689348 | 1689346 | 1689347 | GUAGGGAUAGAGUAAGCAGUA | 1268 |
| 1689351 | 1689349 | 1689350 | GCAGUACAAAGUGUAUAUUUA | 1269 |
| 1689354 | 1689352 | 1689353 | UAUUUUGGAAAAGACAGGUAA | 1270 |
| 1689357 | 1689355 | 1689356 | AGGUAACAGGUAACAGCAUCA | 1271 |
| 1689360 | 1689358 | 1689359 | GCAUCGCUAAUCCAAUUACUA | 1272 |
| 1689363 | 1689361 | 1689362 | UUACUGUGCCUUCUAAACGGA | 1273 |
| 1689366 | 1689364 | 1689365 | AACGGAGACACUCAGACACUA | 1274 |
| 1689369 | 1689367 | 1689368 | ACACUUGAACUCAUCUUUUUA | 1275 |
| 1689372 | 1689370 | 1689371 | UUUUUAUGACUAAUAGUUUUA | 1276 |
| 1689375 | 1689373 | 1689374 | GUUUUUUGAUUAAAAAUGUGA | 1277 |
| 1689378 | 1689376 | 1689377 | AUGUGAACAAGAAAAUACUAA | 1278 |
| 1689381 | 1689379 | 1689380 | UACUAAAAUAAAAAUCCUUUA | 1279 |
| 1689384 | 1689382 | 1689383 | CCUUUCGAUUUAGCCAACUCA | 1280 |
| 1689387 | 1689385 | 1689386 | AACUCUUUUUGCUGUAGGCUA | 1281 |
| 1689390 | 1689388 | 1689389 | AGGCUAGGAAUACACCCUUUA | 1282 |
| 1689393 | 1689391 | 1689392 | CCUUUUUAAAUUAACACACUA | 1283 |
| 1689396 | 1689394 | 1689395 | ACACUGUAGAUCCUUUUUUUA | 1284 |
| 1689399 | 1689397 | 1689398 | UUUUUCUGUUUUAACAUUCCA | 1285 |
| 1689402 | 1689400 | 1689401 | AUUCCUCUAACUCCCCCAUUA | 1286 |
| 1689405 | 1689403 | 1689404 | CCAUUUAUCUUUUGUCUAUUA | 1287 |
| 1689408 | 1689406 | 1689407 | CUAUUAAUAUUCACUAGCCAA | 1288 |
| 1689411 | 1689409 | 1689410 | AGCCAACAUAGUAUUUUUGCA | 1289 |
| 1689414 | 1689412 | 1689413 | UUUGCAGCCUAAGAGUUCAUA | 1290 |
| 1689417 | 1689415 | 1689416 | UUCAUUAUUUAAAAAUAAACA | 1291 |
| 1689420 | 1689418 | 1689419 | UAAACUAAAGAAAUAUGUCAA | 1292 |
| 1689423 | 1689421 | 1689422 | UGUCACCUUUGUUCUGCCUUA | 1293 |
| 1689426 | 1689424 | 1689425 | GCCUUGGUCUUAAGAGAGUUA | 1294 |
| 1689429 | 1689427 | 1689428 | GAGUUGUUUCUAGAGAAACAA | 1295 |
| 1689432 | 1689430 | 1689431 | AAACAAGUUUUAUGGUUCUGA | 1296 |
| 1689435 | 1689433 | 1689434 | UUCUGUUUUCAUUUGUUUCAA | 1297 |
| 1689438 | 1689436 | 1689437 | UUUCAUUUUUUGAAAUUCAGA | 1298 |
| 1689441 | 1689439 | 1689440 | UUCAGGAAUACACAGAGAGAA | 1299 |
| 1689444 | 1689442 | 1689443 | AGAGAAGGCCUAGAGGUUAGA | 1300 |
| 1689447 | 1689445 | 1689446 | GUUAGAGCACUAGAAUGCAAA | 1301 |
| 1689450 | 1689448 | 1689449 | UGCAAAAGAGGAUUUAUUUUA | 1302 |
| 1689453 | 1689451 | 1689452 | AUUUUCUUAAGUUUAGGUAGA | 1303 |
| 1689456 | 1689454 | 1689455 | GGUAGAUAAGUCAGCUCUUUA | 1304 |
| 1689459 | 1689457 | 1689458 | UCUUUUGAAUGUUUUACUUAA | 1305 |
| 1689462 | 1689460 | 1689461 | ACUUAUUUUUGCCUGAGUUCA | 1306 |
| 1689465 | 1689463 | 1689464 | AGUUCCUAGCUUUACGCAUUA | 1307 |
| 1689468 | 1689466 | 1689467 | GCAUUACUAGGAAUAUUUUCA | 1308 |
| 1689471 | 1689469 | 1689470 | UUUUCUUUUACAGGAGGGAGA | 1309 |
| 1689474 | 1689472 | 1689473 | CAGGAGGGAGAAGGGUUUUGA | 1310 |
| 1689477 | 1689475 | 1689476 | GUUAGGUAGGGGAGAACAUUA | 1311 |
| 1689480 | 1689478 | 1689479 | ACAUUUCUGAAAAAGAACUUA | 1312 |
| 1689483 | 1689481 | 1689482 | AACUUAUAAUGAAGCUACAAA | 1313 |
| 1689486 | 1689484 | 1689485 | UACAAAUCCAUCCUUAUUUCA | 1314 |
| 1689489 | 1689487 | 1689488 | AUUUCUUAUUCAGUGCUGAAA | 1315 |
| 1689492 | 1689490 | 1689491 | CUGAAUACUACCUCAUGCAAA | 1316 |
| 1689495 | 1689493 | 1689494 | UGCAAAAUAUUGGUGUGGCUA | 1317 |
| 1689498 | 1689496 | 1689497 | UGGCUGCAAAUUUCCCUCUGA | 1318 |
| 1689501 | 1689499 | 1689500 | CUCUGAAGCUGACACAAUUAA | 1319 |
| 1689504 | 1689502 | 1689503 | AAUUAAGGAUGAAUUACCAUA | 1320 |
| 1689507 | 1689505 | 1689506 | ACCAUAACAUCUUCAUUUUUA | 1321 |
| 1689510 | 1689508 | 1689509 | UUUUUCCUCAUUUCAUUGCCA | 1322 |
| 1689513 | 1689511 | 1689512 | UUGCCUCUCAUACAGUUUUCA | 1323 |
| 1689516 | 1689514 | 1689515 | UUUUCUCCCUCUGAUUUAUUA | 1324 |
| 1689519 | 1689517 | 1689518 | UUAUUUCAUUUUGGUAGUGGA | 1325 |
| 1689522 | 1689520 | 1689521 | AGUGGAUUUUGAAUUAAGUAA | 1326 |
| 1689525 | 1689523 | 1689524 | AAGUAUUUAUUUCUCUUUGCA | 1327 |
| 1689528 | 1689526 | 1689527 | UUUGCAAGUGACUAUUUGAUA | 1328 |
| 1689531 | 1689529 | 1689530 | UUGAUUAACACAUUAAAAAUA | 1329 |
| 1689534 | 1689532 | 1689533 | AAAAUUUUUUAAAAAUUUCCA | 1330 |
| 1689537 | 1689535 | 1689536 | UUUCCCCUUUAAGUUAUGAUA | 1331 |
| 1689540 | 1689538 | 1689539 | AUGAUGGCUGCCUAUAGAAUA | 1332 |
| 1689543 | 1689541 | 1689542 | AGAAUUUAGACUGUUUCUCAA | 1333 |
| 1689546 | 1689544 | 1689545 | UCUCACCCUGAUCCAUCCUGA | 1334 |
| 1689549 | 1689547 | 1689548 | UCCUGAUAUUAUGUUAUUAGA | 1335 |
| 1689552 | 1689550 | 1689551 | AUUAGCUACGAUUUCAAGGUA | 1336 |
| 1689555 | 1689553 | 1689554 | AAGGUCACUUUGAAGUCAGAA | 1337 |
| 1689558 | 1689556 | 1689557 | UCAGACUUCACAGUUUUCUAA | 1338 |
| 1689561 | 1689559 | 1689560 | UUCUACAGGUGUAUUUCUUGA | 1339 |
| 1689564 | 1689562 | 1689563 | UCUUGCUAUGCUCAGUGGGAA | 1340 |
| 1689567 | 1689565 | 1689566 | CUUGCUAUGCUCAGUGGGAAA | 1341 |
| 1689570 | 1689568 | 1689569 | AACCAGGGAGCAGAAAAGAUA | 1342 |
| 1689573 | 1689571 | 1689572 | AAGAUUGUGGAAAGUGGGAAA | 1343 |
| 1689576 | 1689574 | 1689575 | GGGAACAUUAAUUGUCACGUA | 1344 |
| 1689579 | 1689577 | 1689578 | AUUGUCACGUGGCUGUUGAGA | 1345 |
| 1689582 | 1689580 | 1689581 | UGCCUCUUACCAGCCAAGUUA | 1346 |
| 1689585 | 1689583 | 1689584 | AAGUUUUAAAUGGUUAGAGUA | 1347 |
| 1689588 | 1689586 | 1689587 | AGAGUGGCAUUGGCAUUGAUA | 1348 |
| 1689591 | 1689589 | 1689590 | UUGAUUUUGCUUUUCUCUUGA | 1349 |
| 1689594 | 1689592 | 1689593 | UCUUGGGUUUUCUUCAUUUCA | 1350 |
| 1689597 | 1689595 | 1689596 | AUUUCUUUUCAUAAUUCAUCA | 1351 |
| 1689600 | 1689598 | 1689599 | UCAUCUUCAAGCUAUAGAUCA | 1352 |
| 1689603 | 1689601 | 1689602 | AGAUCCAUCCUUCUUCCCUAA | 1353 |
| 1689606 | 1689604 | 1689605 | CCCUAUCCAAAUACUUUGUUA | 1354 |
| 1689609 | 1689607 | 1689608 | UUUGUUCUCAGUGGGCAGUCA | 1355 |
| 1689612 | 1689610 | 1689611 | CAGUCAGAUUUUUUUGGCUUA | 1356 |
| 1689615 | 1689613 | 1689614 | UGGCUUCCAAACCUCACUGAA | 1357 |
| 1689618 | 1689616 | 1689617 | ACUGAGCAUGUUCAGAGAAUA | 1358 |
| 1689621 | 1689619 | 1689620 | AGAAUUCCUCUCAUUAAGGAA | 1359 |
| 1689624 | 1689622 | 1689623 | AAGGAAAUAUUUUUCCCCACA | 1360 |
| 1689627 | 1689625 | 1689626 | CCCACAAUUGUCUGAUGUAUA | 1361 |
| 1689630 | 1689628 | 1689629 | UGUAUGAGUCCUCUCAGAAGA | 1362 |
| 1689633 | 1689631 | 1689632 | AGAAGCACAAGUGCAUACUAA | 1363 |
| 1689636 | 1689634 | 1689635 | UACUAGGAAGGCUUUGUAAAA | 1364 |
| 1689639 | 1689637 | 1689638 | GUAAACUGGUUUUGUAGGCAA | 1365 |
| 1689642 | 1689640 | 1689641 | UGGUUUUGUAGGCAGGCUGUA | 1366 |
| 1689645 | 1689643 | 1689644 | GCUGUACCUGCAAAUAGGCAA | 1367 |
| 1689648 | 1689646 | 1689647 | AGGCAUUCUGAGCAAGGAUCA | 1368 |
| 1689651 | 1689649 | 1689650 | GGAUCCUAAAUUUCCCUUUGA | 1369 |
| 1689654 | 1689652 | 1689653 | UUUCCCUUUGGCUCAUGUCCA | 1370 |
| 1689657 | 1689655 | 1689656 | ACCUUCUCCUUUUUGGCAUGA | 1371 |
| 1689660 | 1689658 | 1689659 | GCAUGUCUGGUGAAAAGCUAA | 1372 |
| 1689663 | 1689661 | 1689662 | AAGCUACAAGGUUCACAGGGA | 1373 |
| 1689666 | 1689664 | 1689665 | CAGGGCCAAAUAUUCUCCCUA | 1374 |
| 1689669 | 1689667 | 1689668 | UCCCUUUUGUUCUCUAAACAA | 1375 |
| 1689672 | 1689670 | 1689671 | AAACAUGUUGCACACAUAAAA | 1376 |
| 1689675 | 1689673 | 1689674 | AUAAACUCAAGGGAGUGAUUA | 1377 |
| 1689678 | 1689676 | 1689677 | UGAUUUCGGUUCCUAAGUCCA | 1378 |
| 1689681 | 1689679 | 1689680 | AGUCCUAGGGAGUUCUAUUCA | 1379 |
| 1689684 | 1689682 | 1689683 | UAUUCCAUUUAUUCUGAUGUA | 1380 |
| 1689687 | 1689685 | 1689686 | GAUGUCCCUUUUAAGGAGGAA | 1381 |
| 1689690 | 1689688 | 1689689 | GAGGAGUUGGUGUUGAAGUGA | 1382 |
| 1689693 | 1689691 | 1689692 | AAGUGUGACAUGCUUUAAUGA | 1383 |
| 1689696 | 1689694 | 1689695 | UAAUGAUAACUGCUUUGGCAA | 1384 |
| 1689699 | 1689697 | 1689698 | UGGCAAUUCCCCAGACAGGUA | 1385 |
| 1689702 | 1689700 | 1689701 | CAGGUAUACUUCUUCAUCCAA | 1386 |
| 1689705 | 1689703 | 1689704 | AUCCAAAAUUGCACCUAAGGA | 1387 |
| 1689708 | 1689706 | 1689707 | UAAGGUGUUCAUUUAGACAAA | 1388 |
| 1689711 | 1689709 | 1689710 | GACAAAAUUGUUCGCUUAGUA | 1389 |
| 1689714 | 1689712 | 1689713 | UUAGUGAUCCACUGAUCUCUA | 1390 |
| 1689717 | 1689715 | 1689716 | UCUCUAAUCAGAAAUAUUUUA | 1391 |
| 1689720 | 1689718 | 1689719 | GAAAUAUUUUUAAAAAAUACA | 1392 |
| 1689723 | 1689721 | 1689722 | AAUACAAUUUAGAUCUCUGAA | 1393 |
| 1689726 | 1689724 | 1689725 | UCUGAAAAUUGGAACCACUCA | 1394 |
| 1689729 | 1689727 | 1689728 | CACUCAAGAGUAUCAUCUUGA | 1395 |
| 1689732 | 1689730 | 1689731 | UCUUGAUAGUGUUACUUCAGA | 1396 |
| 1689735 | 1689733 | 1689734 | UUCAGCAUAUGACUGACUGAA | 1397 |
| 1689738 | 1689736 | 1689737 | ACUGAUUUUAUGAAGGGAGUA | 1398 |
| 1689741 | 1689739 | 1689740 | GGAGUUUAGCUGACUUUUCCA | 1399 |
| 1689744 | 1689742 | 1689743 | UUUCCCUGUAGCCCUAUCAUA | 1400 |
| 1689747 | 1689745 | 1689746 | AUCAUAUUAAAAACAAAAAGA | 1401 |
| 1689750 | 1689748 | 1689749 | AAAAGUGGUCCACUUGAAGCA | 1402 |
| 1689753 | 1689751 | 1689752 | UUGAAGCAGCAAGGACAAAGA | 1403 |
| 1689756 | 1689754 | 1689755 | GGACAAAGGGCAGUUUAGGGA | 1404 |
| 1689759 | 1689757 | 1689758 | UUGGGCAUCCAGAGUGGAAAA | 1405 |
| 1689762 | 1689760 | 1689761 | GGAAAAGGAUUAUUAUUGUAA | 1406 |
| 1689765 | 1689763 | 1689764 | UUGUACAUAAUAGCAGUUCUA | 1407 |
| 1689768 | 1689766 | 1689767 | GUUCUGGCUGGAAUUCCAAUA | 1408 |
| 1689771 | 1689769 | 1689770 | CCAAUCCACUUUCUGGGGAUA | 1409 |
| 1689774 | 1689772 | 1689773 | GGGAUCAUUUUGAUGUUGAAA | 1410 |
| 1689777 | 1689775 | 1689776 | UUGAAUGUUCCCCCAAAGCAA | 1411 |
| 1689780 | 1689778 | 1689779 | AAGCAUUCUGACAAGUUUGGA | 1412 |
| 1689783 | 1689781 | 1689782 | UUUGGUCCACUUGGCUCUUUA | 1413 |
| 1689786 | 1689784 | 1689785 | UCUUUACCCCGGGUAAUAAGA | 1414 |
| 1689789 | 1689787 | 1689788 | AUAAGACCCUUAUUGACUUUA | 1415 |
| 1689792 | 1689790 | 1689791 | ACUUUGAAAAACUGGCAUAAA | 1416 |
| 1689795 | 1689793 | 1689794 | CAUAAAUGAGCUUAAGAAAUA | 1417 |
| 1689798 | 1689796 | 1689797 | GAAAUCCAUUGUAUACAGUCA | 1418 |
| 1689801 | 1689799 | 1689800 | CAGUCCUAGUGUUUGCCUUCA | 1419 |
| 1689804 | 1689802 | 1689803 | CCUUCUUGGUAAAAUUACAUA | 1420 |
| 1689807 | 1689805 | 1689806 | UACAUUUAAGGAUGUCAUUUA | 1421 |
| 1689810 | 1689808 | 1689809 | CAUUUCAUGAGUCAAAUUGUA | 1422 |
| 1689813 | 1689811 | 1689812 | AUUGUAUCUGCUGACACUGAA | 1423 |
| 1689816 | 1689814 | 1689815 | ACUGAAGUGUAUUGAGAUGUA | 1424 |
| 1689819 | 1689817 | 1689818 | GAUGUUGUUCUUUAGUUUAAA | 1425 |
| 1689822 | 1689820 | 1689821 | UUUAAGUAUGUAACAAAGUAA | 1426 |
| 1689825 | 1689823 | 1689824 | AAGUAAUAUUCAAAGGGGAUA | 1427 |
| 1689828 | 1689826 | 1689827 | UCAAAGGGGAUGUUUGGGGGA | 1428 |
| 1689831 | 1689829 | 1689830 | ACCGGGUGGCUUUAUAUUGAA | 1429 |
| 1689834 | 1689832 | 1689833 | AUUGAUAAUGAAAUAUUCCAA | 1430 |
| 1689837 | 1689835 | 1689836 | UUCCAGAGCAAAACACAUUGA | 1431 |
| 1689840 | 1689838 | 1689839 | CAUUGUCCUAAUGAAGUUGUA | 1432 |
| 1689843 | 1689841 | 1689842 | GUUGUUGCAGCUCUCUUCGUA | 1433 |
| 1689846 | 1689844 | 1689845 | UCUUCGUUUUCUUGUGCCGCA | 1434 |
| 1689849 | 1689847 | 1689848 | UUCUUGUGCCGCUGGAAUUGA | 1435 |
| 1689852 | 1689850 | 1689851 | GAAUUGGCUUGUGGGUCACUA | 1436 |
| 1689855 | 1689853 | 1689854 | UCACUUGUUGUGCAAAAGUGA | 1437 |
| 1689858 | 1689856 | 1689857 | AAGUGAAUUAAUUUCAAAUAA | 1438 |
| 1689861 | 1689859 | 1689860 | AAAUAGGAAUCAUAUUGCUUA | 1439 |
| 1689864 | 1689862 | 1689863 | UGCUUUUGUGAAACAAAGAAA | 1440 |
| 1689867 | 1689865 | 1689866 | AAGAAAAUUUACCACCUUGUA | 1441 |
| 1689870 | 1689868 | 1689869 | CUUGUCUGAUACAUAGAUUGA | 1442 |
| 1689873 | 1689871 | 1689872 | GAUUGGAAGGCGCUCUUGGUA | 1443 |
| 1689876 | 1689874 | 1689875 | UUGGUAAAGAAUAACCCACAA | 1444 |
| 1689879 | 1689877 | 1689878 | CCACAAACACCUGAUCUUGAA | 1445 |
| 1689882 | 1689880 | 1689881 | CUUGAUUGGAAAGCAUUGUAA | 1446 |
| 1689885 | 1689883 | 1689884 | UUGUAGGUCAUUAGGGAAAAA | 1447 |
| 1689888 | 1689886 | 1689887 | GAAAACUGAUGAUGCUGACUA | 1448 |
| 1689891 | 1689889 | 1689890 | AUGAUGCUGACUGUUGCUCCA | 1449 |
| 1689894 | 1689892 | 1689893 | GCUCCAGCUGUGUUGGCAAUA | 1450 |
| 1689897 | 1689895 | 1689896 | GCAAUUCAAGAUGACCUUGUA | 1451 |
| 1689900 | 1689898 | 1689899 | CUUGUUACUAACUGAAAGUUA | 1452 |
| 1689903 | 1689901 | 1689902 | AAGUUGCUGUCAACCUUAGCA | 1453 |
| 1689906 | 1689904 | 1689905 | UUAGCAAACAAACCAGCUAAA | 1454 |
| 1689909 | 1689907 | 1689908 | GCUAACACCAUUACAGCACUA | 1455 |
| 1689912 | 1689910 | 1689911 | GCACUGGUUAAGUAGAUUUUA | 1456 |
| 1689915 | 1689913 | 1689914 | AUUUUUACUGGCACUGGCUGA | 1457 |
| 1689918 | 1689916 | 1689917 | CAGCUGAGGAAGGCUAGGAUA | 1458 |
| 1689921 | 1689919 | 1689920 | AGGAUACAGACUUUAAUGACA | 1459 |
| 1689924 | 1689922 | 1689923 | AUGACCAAGAGCCAGACUAGA | 1460 |
| 1689927 | 1689925 | 1689926 | ACUAGCUCGAGCUAGAAAUCA | 1461 |
| 1689930 | 1689928 | 1689929 | AAAUCAGCAACAAAUACCUCA | 1462 |
| 1689933 | 1689931 | 1689932 | ACCUCCUUGUGCUAUUUGAAA | 1463 |
| 1689936 | 1689934 | 1689935 | UUGAAUGCUAAGGUAUUAGUA | 1464 |
| 1689939 | 1689937 | 1689938 | UUAGUUGCAAUAGGCUUACGA | 1465 |
| 1689942 | 1689940 | 1689941 | UUGCAAUAGGCUUACGCCUUA | 1466 |
| 1689945 | 1689943 | 1689944 | GAAUGAGCCUGAUGACACUAA | 1467 |
| 1689948 | 1689946 | 1689947 | CACUAUUACUGUUUACCUGUA | 1468 |
| 1689951 | 1689949 | 1689950 | CCUGUCAAACCAGGGUGGAAA | 1469 |
| 1689954 | 1689952 | 1689953 | UGGAAAUUUAGAGGGAUGCAA | 1470 |
| 1689957 | 1689955 | 1689956 | AUGCAAGUACAGUAUGUCUCA | 1471 |
| 1689960 | 1689958 | 1689959 | GUCUCAUUAAGCAGUCUCUGA | 1472 |
| 1689963 | 1689961 | 1689962 | CUCUGUUGCUGAUUAUAUGAA | 1473 |
| 1689966 | 1689964 | 1689965 | UAUGAAGAUAAAAUUGUUGUA | 1474 |
| 1689969 | 1689967 | 1689968 | GUUGUAUAUGCUGAUCUGUAA | 1475 |
| 1689972 | 1689970 | 1689971 | CUGUAUGUUAUGUACAUUUUA | 1476 |
| 1689975 | 1689973 | 1689974 | AUUUUCACAGUGAUUGAAUCA | 1477 |
| 1689978 | 1689976 | 1689977 | GAAUCAUUGUAAAAAGAAAAA | 1478 |
| 1689981 | 1689979 | 1689980 | GAAAAAAGACAAAAAAGAAUA | 1479 |
| 1689984 | 1689982 | 1689983 | AGAAUCACCACUGUCUAUUUA | 1480 |
| 1689987 | 1689985 | 1689986 | UAUUUUAUGAAGAUGAUAAAA | 1481 |
| 1689990 | 1689988 | 1689989 | AUAAAGCAGCUUUAUUAAAUA | 1482 |
| 1689993 | 1689991 | 1689992 | UAAAUUAUUACAGUUAUGUUA | 1483 |
| 1689996 | 1689994 | 1689995 | AUGUUUCAAAUGGUGUUAUCA | 1484 |
| 1689999 | 1689997 | 1689998 | UUAUCUGCCACAUUGUUUCCA | 1485 |
| 1690002 | 1690000 | 1690001 | UUUCCUUUUAUCUGGUGGUUA | 1486 |
| 1690005 | 1690003 | 1690004 | UCUGGUGGUUCUCUGUUUCCA | 1487 |
| 1690008 | 1690006 | 1690007 | UUUCCCCCUUUAAAUGUGUUA | 1488 |
| 1690011 | 1690009 | 1690010 | GUGUUUUCUCUGCUUCAAAAA | 1489 |
| 1690014 | 1690012 | 1690013 | CAAAAAUUUAAUGCAUUUUAA | 1490 |
| 1690017 | 1690015 | 1690016 | UUUUAGUAUUAAAGGCUAUUA | 1491 |
| 1690020 | 1690018 | 1690019 | UCCUGCCUUUCAGUGGUCUGA | 1492 |
| 1690023 | 1690021 | 1690022 | UAAGGCAGUAGGGAUGGGGUA | 1493 |
| 1690026 | 1690024 | 1690025 | ACCCCACCUUCUCCUUUUUGA | 1494 |
| 1690029 | 1690027 | 1690028 | AUGUUUGGGGGUGGGGCUGGA | 1495 |
| 1690032 | 1690030 | 1690031 | CUCUAGUGAGGGGAAUGAGCA | 1496 |

### Example 7: Effect of RNAi Compounds on Human PCDH19 In Vitro, Single Dose

[0474] Double-stranded RNAi compounds described above are tested in a series of experiments for their single dose effects on PCDH19 RNA in vitro in cultured cells that express PCDH19.

[0475] Cultured cells are treated with double-stranded RNAi. RNA is isolated from the cells and PCDH19 RNA levels are measured by quantitative real-time RTPCR. A human PCDH19 primer-probe set is used to measure RNA levels. PCDH19 RNA levels are normalized to total RNA content, as measured by RIBOGREEN®.

### Example 8: Effect of Modified Oligonucleotides on Human PCDH19 RNA Levels in Neurons Differentiated from IPS Cells, Multiple Dose

[0476] Modified oligonucleotides selected from the examples above were tested at various doses in neurons differentiated from IPSCs (Gibco, Cat. #A18945). The IPSCs were differentiated into neurons using the Elixirgen Scientific Quick Neuron™ Excitatory kit (Cat. #EX-SeV-L). The neurons were aged for 2 weeks, and were treated by free uptake with various concentrations of modified oligonucleotide as specified in the tables below.

[0477] Seven days post treatment total RNA was isolated from the cells, and PCDH19 RNA levels were measured by quantitative real-time RT-PCR. Human PCDH19 primer-probe set RTS53390 (described herein above) was used to measure RNA levels as described above. PCDH19 RNA levels were normalized to total RNA content, as measured by human GAPDH. Human GAPDH was amplified using human primer probe set RTS104 (described herein above). Reduction of PCDH19 RNA is presented in the tables below as percent PCDH19 RNA, relative to the amount of PCDH19 in untreated control cells (% UTC).

[0478] The half maximal inhibitory concentration (IC₅₀) of each modified oligonucleotide was calculated using GraphPad Prism and is also presented in the tables below.

TABLE 10
Effect of modified oligonucleotides on human PCDH19
RNA levels in neurons differentiated from IPS cells

| | PCDH19 RNA (% UTC) | | | | |
|---|---|---|---|---|---|
| Compound No. | 40 nM | 200 nM | 1000 nM | 5000 nM | IC₅₀ (μM) |
| 1626339 | 82 | 63 | 33 | 16 | 0.28 |
| 1626361 | 96 | 57 | 34 | 20 | 0.18 |

TABLE 11
Effect of modified oligonucleotides on human PCDH19
RNA levels in neurons differentiated from IPS cells

| | PCDH19 RNA (% UTC) | | | | | |
|---|---|---|---|---|---|---|
| Compound | 32 | 160 | 800 | 4000 | 20000 | |
| No. | nM | nM | nM | nM | nM | IC₅₀ (μM) |
| 1653817 | 101 | 96 | 89 | 93 | 52 | 18.36 |
| 1653823 | 102 | 84 | 78 | 50 | 26 | 2.47 |
| 1653827 | 84 | 87 | 79 | 59 | 28 | 4.37 |

### Example 9: Effect of Modified Oligonucleotides on Human PCDH19 Protein Levels in Neurons Differentiated from IPS Cells, Multiple Dose

[0479] Modified oligonucleotides selected from the examples above were tested at various doses in neurons differentiated from IPSCs (neurons derived as described herein above). The neurons were aged for 2 weeks, and were treated by free uptake with various concentrations of modified oligonucleotide as specified in the table below.

[0480] Seven days post treatment, human PCDH19 protein levels in the treated neurons were determined using western blot analysis, detecting PCDH19 using a PCDH19 polyclonal antibody from Bethyl Laboratories (cat. #A304-468A). Reduction of PCDH19 protein is presented in the table below as percent PCDH19 protein relative to the amount of PCDH19 in untreated control cells (% UTC).

TABLE 12
Effect of modified oligonucleotides on human PCDH19 protein
levels in neurons differentiated from IPS cells

| | | PCDH19 Protein |
|---|---|---|
| Compound No. | Dose (nM) | (% UTC) |
| 1626339 | 5000 | 19 |
| 1626361 | 5000 | 28 |
| 1653817 | 20000 | 85 |
| 1653823 | 20000 | 52 |
| 1653827 | 20000 | 48 |

### Example 10: Effect of RNAi Compounds that Target a Human PCDH19 Nucleic Acid, In Vitro, Single Dose

[0481] RNAi compounds described in the example above were tested for their single dose effects on PCDH19 RNA in vitro. The RNAi compounds were tested in a series of experiments that had the same culture conditions.

[0482] Cultured HEK293 cells were treated with RNAi compounds at a concentration of 200 nM by Lipofectamine RNAiMAX at a density of 10,000 cells per well. After a treatment period of 72 hours, total RNA was isolated from the cells and PCDH19 RNA levels were measured by quantitative real-time RT-PCR using human primer-probe set

[0483] RTS53390 (described herein above). PCDH19 RNA levels were normalized to total RNA content, as measured by RIBOGREEN®. Reduction of PCDH19 RNA is presented in the table below as percent PCDH19 RNA relative to the amount in untreated control cells (% UTC). The values marked with a “+” indicate that the modified oligonucleotide is complementary to the amplicon region of the primer probe set. Additional assays may be used to measure the potency and efficacy of the modified oligonucleotides complementary to the amplicon region. Each table below represents a separate experiment.

TABLE 13
Reduction of PCDH19 RNA by RNAi compounds at
a concentration of 200 nM in HEK293 cells

| Compound No. | PCDH19 RNA (% UTC) |
|---|---|
| 1688359 | 26 |
| 1688389 | 61 |
| 1688404 | 71 |
| 1688431 | 45 |
| 1688440 | 43 |
| 1688443 | 46 |
| 1688464 | 25 |
| 1688467 | 35 |
| 1688494 | 34 |
| 1688521 | 17 |
| 1688524 | 132 |
| 1688542 | 66 |
| 1688581 | 54 |
| 1688599 | 66 |
| 1688946 | 24 |
| 1688949 | 29 |
| 1688961 | 17 |
| 1688973 | 2† |
| 1688985 | 9† |
| 1689000 | 59 |
| 1689015 | 26 |
| 1689024 | 79 |
| 1689063 | 14 |
| 1689069 | 76 |
| 1689096 | 48 |
| 1689129 | 11 |
| 1689132 | 26 |
| 1689153 | 37 |
| 1689168 | 26 |
| 1689183 | 36 |
| 1689195 | 44 |
| 1689204 | 27 |
| 1689213 | 22 |
| 1689231 | 35 |
| 1689243 | 21 |
| 1689258 | 34 |
| 1689270 | 19 |
| 1689276 | 32 |
| 1689282 | 33 |
| 1689285 | 52 |
| 1689297 | 29 |
| 1689306 | 24 |
| 1689333 | 39 |
| 1689351 | 36 |
| 1689381 | 24 |
| 1689411 | 26 |
| 1689414 | 44 |
| 1689453 | 34 |
| 1689459 | 21 |
| 1689465 | 27 |
| 1689489 | 33 |
| 1689501 | 36 |
| 1689504 | 20 |
| 1689531 | 51 |
| 1689546 | 38 |
| 1689552 | 31 |
| 1689555 | 24 |
| 1689576 | 17 |
| 1689603 | 109 |
| 1689633 | 29 |
| 1689684 | 47 |
| 1689726 | 52 |
| 1689744 | 97 |
| 1689783 | 47 |
| 1689801 | 37 |
| 1689804 | 34 |
| 1689819 | 21 |
| 1689825 | 69 |
| 1689837 | 39 |
| 1689858 | 59 |
| 1689861 | 88 |
| 1689870 | 46 |
| 1689915 | 69 |
| 1689939 | 45 |
| 1690002 | 25 |
| 1690005 | 40 |
| 1690008 | 64 |
| 1690032 | 79 |

TABLE 14
Reduction of PCDH19 RNA by RNAi compounds at
a concentration of 200 nM in HEK293 cells

| Compound No. | PCDH19 RNA (% UTC) |
|---|---|
| 1688317 | 70 |
| 1688320 | 37 |
| 1688335 | 41 |
| 1688338 | 59 |
| 1688347 | 44 |
| 1688353 | 72 |
| 1688392 | 48 |
| 1688395 | 26 |
| 1688407 | 31 |
| 1688425 | 18 |
| 1688434 | 32 |
| 1688446 | 77 |
| 1688476 | 65 |
| 1688485 | 22 |
| 1688509 | 33 |
| 1688578 | 65 |
| 1688584 | 78 |
| 1688596 | 62 |
| 1688614 | 12 |
| 1688620 | 45 |
| 1688958 | 95 |
| 1688967 | 15 |
| 1688979 | 10† |
| 1688991 | 7† |
| 1689033 | 50 |
| 1689042 | 69 |
| 1689057 | 21 |
| 1689087 | 13 |
| 1689105 | 10 |
| 1689123 | 41 |
| 1689138 | 20 |
| 1689159 | 23 |
| 1689174 | 31 |
| 1689273 | 32 |
| 1689288 | 24 |
| 1689309 | 32 |
| 1689312 | 36 |
| 1689315 | 18 |
| 1689321 | 39 |
| 1689327 | 92 |
| 1689339 | 45 |
| 1689354 | 31 |
| 1689363 | 47 |
| 1689366 | 36 |
| 1689378 | 31 |
| 1689432 | 24 |
| 1689468 | 25 |
| 1689480 | 19 |
| 1689528 | 24 |
| 1689534 | 111 |
| 1689564 | 36 |
| 1689600 | 41 |
| 1689624 | 45 |
| 1689627 | 29 |
| 1689645 | 62 |
| 1689648 | 247 |
| 1689660 | 37 |
| 1689663 | 43 |
| 1689705 | 86 |
| 1689711 | 38 |
| 1689723 | 31 |
| 1689732 | 33 |
| 1689765 | 29 |
| 1689777 | 45 |
| 1689789 | 54 |
| 1689798 | 23 |
| 1689822 | 16 |
| 1689834 | 28 |
| 1689843 | 70 |
| 1689927 | 32 |
| 1689957 | 37 |
| 1689972 | 27 |
| 1689975 | 16 |
| 1689981 | 39 |
| 1689990 | 73 |
| 1690011 | 34 |
| 1690017 | 33 |
| 1690023 | 170 |

TABLE 15
Reduction of PCDH19 RNA by RNAi compounds at
a concentration of 200 nM in HEK293 cells

| Compound No. | PCDH19 RNA (% UTC) |
|---|---|
| 1688344 | 37 |
| 1688380 | 107 |
| 1688386 | 47 |
| 1688437 | 91 |
| 1688461 | 76 |
| 1688470 | 39 |
| 1688479 | 51 |
| 1688488 | 97 |
| 1688491 | 19 |
| 1688500 | 32 |
| 1688515 | 52 |
| 1688518 | 51 |
| 1688539 | 46 |
| 1688554 | 32 |
| 1688569 | 43 |
| 1688587 | 74 |
| 1688605 | 47 |
| 1688611 | 22 |
| 1688623 | 82 |
| 1688970 | 53† |
| 1688994 | 17† |
| 1689036 | 38 |
| 1689075 | 32 |
| 1689144 | 43 |
| 1689165 | 21 |
| 1689192 | 24 |
| 1689210 | 19 |
| 1689222 | 15 |
| 1689249 | 32 |
| 1689252 | 75 |
| 1689291 | 24 |
| 1689294 | 23 |
| 1689303 | 27 |
| 1689324 | 36 |
| 1689342 | 20 |
| 1689360 | 34 |
| 1689369 | 17 |
| 1689375 | 25 |
| 1689393 | 26 |
| 1689408 | 40 |
| 1689423 | 30 |
| 1689438 | 36 |
| 1689441 | 45 |
| 1689456 | 33 |
| 1689462 | 37 |
| 1689486 | 51 |
| 1689498 | 22 |
| 1689543 | 30 |
| 1689561 | 26 |
| 1689579 | 95 |
| 1689597 | 51 |
| 1689609 | 51 |
| 1689618 | 20 |
| 1689630 | 42 |
| 1689636 | 45 |
| 1689675 | 42 |
| 1689714 | 44 |
| 1689720 | 90 |
| 1689735 | 41 |
| 1689762 | 59 |
| 1689768 | 26 |
| 1689771 | 128 |
| 1689816 | 38 |
| 1689831 | 31 |
| 1689852 | 51 |
| 1689891 | 41 |
| 1689894 | 147 |
| 1689897 | 54 |
| 1689909 | 44 |
| 1689912 | 49 |
| 1689936 | 53 |
| 1689951 | 47 |
| 1689960 | 32 |
| 1689966 | 24 |
| 1689993 | 47 |
| 1689996 | 38 |
| 1689999 | 37 |
| 1690029 | 85 |

TABLE 16
Reduction of PCDH19 RNA by RNAi compounds at
a concentration of 200 nM in HEK293 cells

| Compound No. | PCDH19 RNA (% UTC) |
|---|---|
| 1688314 | 38 |
| 1688323 | 54 |
| 1688329 | 44 |
| 1688350 | 60 |
| 1688356 | 30 |
| 1688365 | 26 |
| 1688368 | 43 |
| 1688383 | 35 |
| 1688401 | 15 |
| 1688410 | 24 |
| 1688413 | 45 |
| 1688416 | 38 |
| 1688428 | 81 |
| 1688449 | 26 |
| 1688473 | 18 |
| 1688503 | 53 |
| 1688545 | 18 |
| 1688548 | 26 |
| 1688560 | 51 |
| 1689003 | 31 |
| 1689018 | 75 |
| 1689021 | 22 |
| 1689027 | 52 |
| 1689030 | 45 |
| 1689048 | 37 |
| 1689054 | 24 |
| 1689078 | 17 |
| 1689081 | 17 |
| 1689099 | 30 |
| 1689108 | 33 |
| 1689111 | 20 |
| 1689114 | 50 |
| 1689147 | 18 |
| 1689162 | 21 |
| 1689171 | 31 |
| 1689177 | 21 |
| 1689180 | 23 |
| 1689216 | 39 |
| 1689237 | 18 |
| 1689264 | 53 |
| 1689279 | 40 |
| 1689300 | 55 |
| 1689318 | 46 |
| 1689336 | 42 |
| 1689348 | 31 |
| 1689357 | 33 |
| 1689387 | 29 |
| 1689390 | 36 |
| 1689426 | 47 |
| 1689444 | 39 |
| 1689447 | 27 |
| 1689483 | 30 |
| 1689549 | 30 |
| 1689570 | 42 |
| 1689582 | 74 |
| 1689612 | 39 |
| 1689615 | 39 |
| 1689639 | 42 |
| 1689654 | 79 |
| 1689699 | 57 |
| 1689702 | 23 |
| 1689747 | 80 |
| 1689753 | 35 |
| 1689774 | 39 |
| 1689810 | 23 |
| 1689828 | 50 |
| 1689849 | 54 |
| 1689855 | 57 |
| 1689864 | 35 |
| 1689867 | 94 |
| 1689888 | 87 |
| 1689900 | 25 |
| 1689918 | 36 |
| 1689924 | 50 |
| 1689948 | 22 |
| 1689963 | 36 |
| 1689978 | 35 |
| 1689984 | 30 |

TABLE 17
Reduction of PCDH19 RNA by RNAi compounds at
a concentration of 200 nM in HEK293 cells

| Compound No. | PCDH19 RNA (% UTC) |
|---|---|
| 1688326 | 36 |
| 1688332 | 45 |
| 1688341 | 118 |
| 1688371 | 85 |
| 1688377 | 58 |
| 1688419 | 45 |
| 1688422 | 61 |
| 1688452 | 72 |
| 1688455 | 51 |
| 1688497 | 25 |
| 1688512 | 25 |
| 1688530 | 38 |
| 1688551 | 65 |
| 1688566 | 14 |
| 1688572 | 18 |
| 1688602 | 32 |
| 1688608 | 28 |
| 1688617 | 5 |
| 1688626 | 25 |
| 1688955 | 34 |
| 1688964 | 49 |
| 1688988 | 1† |
| 1688997 | 11† |
| 1689006 | 76 |
| 1689012 | 51 |
| 1689039 | 26 |
| 1689060 | 18 |
| 1689072 | 13 |
| 1689090 | 14 |
| 1689093 | 54 |
| 1689117 | 54 |
| 1689120 | 24 |
| 1689126 | 21 |
| 1689141 | 21 |
| 1689186 | 35 |
| 1689198 | 32 |
| 1689201 | 29 |
| 1689228 | 16 |
| 1689234 | 26 |
| 1689255 | 43 |
| 1689267 | 14 |
| 1689345 | 25 |
| 1689396 | 41 |
| 1689399 | 24 |
| 1689402 | 33 |
| 1689405 | 54 |
| 1689435 | 13 |
| 1689450 | 30 |
| 1689471 | 42 |
| 1689477 | 46 |
| 1689492 | 56 |
| 1689495 | 33 |
| 1689507 | 45 |
| 1689510 | 11 |
| 1689513 | 45 |
| 1689558 | 30 |
| 1689585 | 61 |
| 1689606 | 27 |
| 1689621 | 54 |
| 1689657 | 82 |
| 1689678 | 25 |
| 1689693 | 38 |
| 1689696 | 32 |
| 1689717 | 47 |
| 1689756 | 65 |
| 1689759 | 37 |
| 1689780 | 53 |
| 1689840 | 32 |
| 1689873 | 59 |
| 1689876 | 33 |
| 1689882 | 39 |
| 1689885 | 68 |
| 1689903 | 25 |
| 1689906 | 36 |
| 1689933 | 52 |
| 1689942 | 50 |
| 1689954 | 46 |
| 1689987 | 60 |

TABLE 18
Reduction of PCDH19 RNA by RNAi compounds at
a concentration of 200 nM in HEK293 cells

| Compound No. | PCDH19 RNA (% UTC) |
|---|---|
| 1688362 | 27 |
| 1688374 | 47 |
| 1688398 | 80 |
| 1688458 | 44 |
| 1688482 | 44 |
| 1688506 | 37 |
| 1688527 | 129 |
| 1688533 | 40 |
| 1688536 | 44 |
| 1688557 | 31 |
| 1688563 | 26 |
| 1688575 | 114 |
| 1688590 | 86 |
| 1688593 | 126 |
| 1688952 | 22 |
| 1688976 | 3† |
| 1688982 | 0† |
| 1689009 | 38 |
| 1689045 | 12 |
| 1689051 | 51 |
| 1689066 | 77 |
| 1689084 | 21 |
| 1689102 | 32 |
| 1689135 | 18 |
| 1689150 | 21 |
| 1689156 | 25 |
| 1689189 | 16 |
| 1689207 | 13 |
| 1689219 | 15 |
| 1689225 | 45 |
| 1689240 | 21 |
| 1689246 | 32 |
| 1689261 | 15 |
| 1689330 | 33 |
| 1689372 | 28 |
| 1689384 | 42 |
| 1689417 | 45 |
| 1689420 | 26 |
| 1689429 | 57 |
| 1689474 | 63 |
| 1689516 | 33 |
| 1689519 | 21 |
| 1689522 | 22 |
| 1689525 | 29 |
| 1689537 | 61 |
| 1689540 | 33 |
| 1689567 | 26 |
| 1689573 | 32 |
| 1689588 | 35 |
| 1689591 | 27 |
| 1689594 | 27 |
| 1689642 | 50 |
| 1689651 | 48 |
| 1689666 | 69 |
| 1689669 | 31 |
| 1689672 | 47 |
| 1689681 | 34 |
| 1689687 | 37 |
| 1689690 | 81 |
| 1689708 | 29 |
| 1689729 | 65 |
| 1689738 | 43 |
| 1689741 | 34 |
| 1689750 | 15 |
| 1689786 | 48 |
| 1689792 | 74 |
| 1689795 | 38 |
| 1689807 | 19 |
| 1689813 | 27 |
| 1689846 | 19 |
| 1689879 | 34 |
| 1689921 | 38 |
| 1689930 | 36 |
| 1689945 | 33 |
| 1689969 | 24 |
| 1690014 | 105 |
| 1690020 | 31 |
| 1690026 | 67 |

The application's sequence listing, which the Patent Office published only in electronic form, follows.

SEQUENCE LISTING (1496 sequences)

SEQ ID NO: 1 - DNA, 118630 bp, Homo sapiens
  source 1..118630: mol_type = genomic DNA
agtagtttgcggcatccggaggagcagcagcagcagtagcggcggcggctggcgcagcgcggagacggacgagcgggcacagacggcagcacagctcccgtgcaccatgcctggcttgcccgggaggcactggcacccgcgtccctagcccggcgctggcccttggcgcgttgcgctccgcagcattccggctgagcgatttcatccgaaatcctaaacctcctaccccaaacccattgcctcctgcttgctcatactccacactcacactccccacaccacacactcactcttcctctctctctcacacattcacacacagcccgagacagacagagaaagcgagacagacctcccgagtgcgcgagcgcccgggaggaagggagcccaacgcagcgcggccagcgcctctccgggaagatgaaatcaagacgctcctgcaagtaaacttcggcggcgacaaaatcgtcgactgtggcagctgctgaggcggaccccagcgacgtgcaactgagctaggagggcttcctcccgcggcggcggcggcggcggcggcggcggcggaccttggagcgacaccccagcccaaacggagagaagagaagcacccggtacccacggcggcggccccgcctctcctggccggtactgttgttgcctccccttccctcttccccattccccgccacccccggccattagaaagaccggggctttgattttcttggacaaattgccatctccccgtttccacaaacttgacgtggagggtcggactgcgttgttaactttgatttcctagacgaaaacgcccgcagaccctcaactgctctgtggggggaactccgctcccacctcggatcctggacagacgcgcccccaagcccttcgaagccagccttagcgcgagggagcgcgctcaagctctggcagcctctctcccctcccccttcctctgctggccccgggaccgccatccgactcaaccctataaccgggtgcccgcggcgcttgccagtaactgactcccgtctgcgacaccccctttctcccgaacaggcctcgaagaggccagtgtggcccccccagaccccggagggcgcattccaagcgggtactctctccgcagtgaactgggagcgctggggggaggtctttgcgcatgccaggtgcacagacagcgagttcgccagcctcagtgccggtgcaccgcggcgggccgggcagtgcctgaaaggctgcgcctcctccgccctctttaccttcgcctcaagtactgtccggactcagcggtgcgtcctccaggccgcgcagacgccgcccgacccgcagccctgggcggctgccgacagtcgcgcccggctaactttgaaggggtaaaactgagtagccgggctggagggagggggctcggggccgcgcggcgctcccttggcccctcggagcccccggggcccccgcgagcccccgccgcgtccgccgcaacctcagcattggagccgccgcgggtgtcccccgcgcgccgccgggccgccctgggcgggacttctcccgcggcctccggggccacggggcgcgcgcaacaggcggcccgagccggcgggaagctggagcgccgacggcgtcggtctcggaggggtgtggagaggcgaggccaggcagagccccgtgcagccatggagtcgctcctgctgccggtgctgctgctgctggccatactgtggacgcaggctgccgccctcattaatctcaagtactcggtagaagaggagcagcgcgccgggacggtgattgccaacgtggccaaagacgcgcgagaggcgggcttcgcgctggacccccggcaggcttcagcctttcgcgtggtgtccaactcggctccacacctagtggacatcaatcccagctctggcctgctggtcaccaagcagaagattgaccgtgatctgctgtgccgccagagccccaagtgcatcatctcgctcgaggtcatgtccagctcaatggaaatctgcgtgataaaggtggagatcaaggacctgaacgacaatgcgcccagtttcccggcagcacagatcgagctggagatctcggaggcagccagccctggcacgcgcatcccgctggacagcgcttacgatccagactcaggaagctttggcgtgcagacttacgagctcacgcccaacgagctgttcggcctggagatcaagacgcgcggcgacggctcccgctttgccgaactcgtggtggaaaagagcctggaccgcgagacgcagtcgcactacagcttccgaatcactgcgctagacggtggcgacccgccgcgcctgggcaccgttggccttagtatcaaggtgaccgactccaatgacaacaacccggtgtttagcgagtccacctacgcggtgagcgtgccagaaaactcgcctcccaacacacccgtcatccgcctcaacgccagcgatccagacgagggcaccaacggccaggtggtctactccttctatggctacgtcaacgaccgcacgcgcgagctctttcagatcgacccgcacagtggcctggtcactgtcactggcgctttagactacgaagaggggcacgtgtacgaactggacgtgcaggctaaggacttggggcccaattccatcccggcacactgcaaggtcaccgtcagcgtgctggacaccaatgacaatccgccggtcatcaacctgctgtcagtcaacagtgagcttgtggaggtcagcgagagcgcccccccgggctacgtgatcgccttggtgcgggtgtctgatcgcgactcaggcctcaatggacgtgtgcagtgccgtttgctgggcaatgtgccctttcgactgcaggaatatgagagcttctccactattctggtggacggacggctggaccgcgagcagcacgaccaatacaacctcacaattcaggcacgcgacggcggcgtgcccatgctgcagagtgccaagtcctttaccgtgctcatcactgacgaaaatgacaaccacccgcacttttccaagccctactaccaggtcattgtgcaggagaacaacacgcctggcgcctatctgctctctgtgtctgctcgcgaccccgacctgggtctcaacggcagtgtctcctaccagatcgtgccgtcgcaggtgcgggacatgcctgtcttcacctatgtctccatcaatcccaactcaggcgacatctacgcgctgcgatcctttaaccacgagcagaccaaggcgttcgaattcaaggtgctggccaaggacggcggccttccctcactgcaaagcaacgctacggtgcgggtcatcatcctcgacgtcaacgacaacaccccggtcatcacagccccacctctgattaacggcactgccgaggtctacataccccgcaactctggcataggctacctggtgactgttgtcaaggcagaagactacgatgagggcgaaaatggccgagtcacctacgacatgaccgagggcgaccgcggcttctttgaaatagaccaggtcaatggcgaagtcagaaccacccgcaccttcggggagagctccaagtcctcctatgagcttatcgtggtggctcacgaccacggcaagacatctctctctgcctctgctctcgtcctaatctacttgtcccctgctctcgatgcccaagagtcaatgggctctgtgaacttgtccttgattttcattattgccctgggctccattgcgggcatcctctttgtaactatgatcttcgtggcaatcaagtgcaagcgagacaacaaagagatccggacctacaactgcaggtaaagccaagttttctttctttgtcttggatgaataaggtgtgtttatctgtgtctctgtgtgaaaatcctggtgcttttgtttcctacttaaatgcatgcagcatacttgcagtgcttctttttgtagggtgaaaagtttgtgacagtccaagttgatcaattcttttgatctgacaatttgctggaagacaatcatttagtgtttgaatggattctgtcacataatgatggtgagcagaaacgcaattatcattttaaaatttgcatagctgtctccatgaagttatggtaggaaaaacagagagagagagagggagggggagagagagagagatcatatttttaggaaaaccaccaactaccacaacttggtgtctggggcacagtgtttttgggacaggtactgaatgaaaggagagggagtgttggcagctaccctgtcttgttgcagtgatgaactctggagagagactgggagtgggagtgtaagatgggaaagggagatgagggggaggagagaacaggagtgtgtggagatgcaggtgattagtggtttttagtttattcttggcttgttttttatctagtccccaaacatctggctatataaagtgaaattctatcaggcatctgtatgttttcaaatatctggttggttggtagtgtggagaccaaacatcccaatgaggaacaagactttgcatccagatgtttcagtaaaaatagcaatcttctagagttgatgatgctttcctctaatgtgagactgtgttgtggcattaagatctggttcctaccagtggatgtcactgtgggctattgtgttacagtttctcttgaagtgtgtgaaggatgtgtgtgtgtctgtgtgtgtatgggggggggagggagagagagagggatagaagggggaggaaaagggagaaaagaagaaacacagtattttttaaaaagatttcctgataagcacattagaaggtcttactgaagccctttcttacatttggatagagcacataagtctaagcatttctagaatcctagaatccaatttaggataatacatgacattttttttccagcagtgtctcatcgaaacagttgaaaaaagttgtttctttagtttgctgaaaatgaatgatgctgctatttacaaccaaggtgtgtgtgtgctttcaacacacctacacatcagtgtgtcttttgtgccatttgtgtctgcatgttaatcagtcaaaatatgttcctgtaggttcagtttgtatttgacaccgtctgaaatgcacacttctgtgaatcagagccccctgaatatgtaacagccatgcaattattgtttcccttttactattctctgcgttacacaagttagtagacaaatgctaaccacacatgaatatcaatcaggtgccataaaagagcagctgcaatgcctcataaatgctttaatcctgttactagtgaaatggccatgacttttctttccttcagcaccaagtcatttcagatgggagaaatgtaaattaatattgctcttagctttcaaacctgtgactgctagtggcgatttttataggagaaaaatgtggggtcaataaaattttatttatatggagataattatggagaggactctttttaagccatcttctcagcataaagtaaatgcataagatcctttccttgatgaaaaagaaatcagcttgaaataaagatattgaaggctttgccacctcttggtgatgtatgactagaagtgagagccctttctgagaacttgccaaggagatgattaaacaggaggagagcatctgaatattgaaaaaaaaaaaaaagagtaaatctcagtgctctccaacttcacccaaatgtgtattttgtgaagcgttctgtttcctgtgatggtttgggattaatgaagtacagtataattaaataattggttaatacagaaagggctgcacaatgaatgcttcagctgaataatttgatggggcattgccaaagttactcatcttgggtaaacaaaatgattaaaatttcccattgattctgtaaacagattagaatagaaaatcaaccttagtactagggttttggggattttatctgctcccaaaccccagtagtaccagtttgccatcactgcaaatcttcctgagcacagagcgaaggggtgaggggaactcaattgcttaactctaggtagatcctggggacagagcaagaatttgcctctgtagatgtgtagtctccctatctgctcagactttttagaaacctaaagttcaggagcgtgtctttccatgtgattaggcagaggtttctttttctaagcctccgcagaacctcttcctgaaatgcattcatttatgagacttgcgagatgatctgcaattgctgcttgaattgggctccctttttgtattcagacaattagctttgtcgagtgagaataaggcacagtctttcccttgtaaagatcaacctgtattacttattaaccctattgttttgctgattattgcccagaaatcgaatttccaaaaaagaaactgaatcattatgtgcaaagtaataaatgactttgagaatctggctacatttaaatgtatttcttttgacaagtctcttaatgcctggtgtctttggtgcacgttgctgggtctgtgtcagtgttaattaaattgagctctttatgttccagttgcagcacagctgcttgtaggtacacctgaatggagaaggatgctgaatgcactaacctttaaattcctttgcagtaattgtttaaccatcacttgtctcctcggctgttttataaaaggacaaaacagcaagtgtctgcattgcatctcggtttctcccattagcgaggagcaagacaaaaagacagaggagaaagtgagcctaaggggaaagaggtaaaaaggcatttcccctcatttaaatgggtttggctattagatttttctaggagaggagggggtcggggggtgagtaaaagggaaccgggctagggcagggaggagggtgtggaggagacgcgaaagaatggggtctgatctcctaccccagtccaaaactgatcgagtgagtcatagaggaagctgattgagggcgtgtgccacatggcaaatgcctggaggaactggcaagggggtgggggcgggtattttttattttcctctatctcctctttggtgacttgctttgtatttcacctaggagttccttttggttccagggaagctccagatttgagcattttcatgctttctctcccataggctcaactttccctgtccccccacccgtgctcacaggccactcacaatgaaaaattccaaatccaaagtatagaaacttttttagggggggttggtgggaggttactatgtttaatatgaaaagtttatggccctcagcctgttttcccttgtaaaaagcacagggagaaacccgatgatgtaatgcaccagaataaggagctggagcggagatggggtgcaaccctctggggtgcttaatgtttattaatcagtgcatgatttgggagggtgttagtgattcatgctgccttttctgtcacatagaattgctgagtactcctatgggcatcaaaagaaatcaagcaagaagaaaaaaatcagtaagaatgacatccgcctggtaccccgggatgtggaggagacagacaagatgaacgttgtcagttgctcttccctgacctcctccctcaactattttgactaccaccagcagacgctgcccctgggctgccgccgctctgagagcactttcctgaatgtggagaaccagaatacccgcaacaccagtgctaaccacatctaccatcactctttcaacagccaggggccccagcagcctgacctgattatcaacggtgtgcctctgcctgaggtgagtgcagctaagtggctctgtgaggttctcccaggtctccttctttagctgctcgctggataccataagctgctgtgctggcacatcccctggcaggggtggggagaatttctctgcttatgcccattttcatactaagggtttgctatcagtgcttcttggagcaaaaggtaacccaacatactgggcctttgtgtaggtatgggtattggaattggtaactcaaagagtctgagcccttgaaatcattatcctggcataactcaagtttgctccacctgttgcaaatatagcatgcttgacagccagcagtaccagtatgccagtaaagtggcttagaaagagtcatcaagtagtgttgaaaatggatgaaaccctctaatgccctgggaccaattttccagtgtgagagtgattcagcctcctaaagaccccatttgctttttctttcgtcacatcactgttctctagcattttggtgagagaatatggataggctggttaaagggaggcaaagcaaaaaaattaaaaagccactttgccatttcttagcagttctagtggtaacatttgatggttgaggagattgaaactgtcattattgctgaaaatttaagaattagttggctggttgcagtggctcacacctgtaatcccagtactttgagaggccgaggcaggagaatcggttgagcctggaattccagaccagcttgccagcctgggcaatatagtgagacttcgtctctaacaacgaaaaaaaaaaagagtaagaataagaataagaattatctatgcatttgagtgagctctgtttctttctcttcactgggaatgaatgtatttaagtagaattttttttttttttttgagatggagtttctcttgttgtccaggctagagtgcaatggcacaatgttggctcaccgcaacctccacctcccggcttcaagcaattctcctgctccagcctccagagtagctgggattacaggcatgcaccaccacgcccagctaattttgtatttttagtagagacggggtttcaccatgttggtcaggctggtctcaaactcctgactgcaggtgatcctcccacctcagcctcccaaagtgctgggattacaggcatgagccactgcaccgggcttaagtagaaatattttttaaaatgtgatgtggtcagatgtttgctggctattgaaatattttagggcagtagagtggtatatggatgatggctggtgggtggctgggaggaaggctataagtaacatttcttaagttgatttcatttttccatgaattgcttaagtccctctttggttagaaatctgatgcactgggaggcatatgtcctcttccaagctaccagcgaaaagaatactgcatacttagagagcactttcacatctttcaaagcaccttcccaaacattgtttcgtttgatcctcacaatcaggtatcttgataggttgcccttcagtagatgatgaaacagaggtccagagatgctaagggacttactcagactcacaaagctggtcatcaagagagggaggacgagactgaaggactctatactgcctggcaaatgtgatttcagtgacaccttcctgccttaaaagtaattcagcctgacatacccaggctatgatgcatacataaaatggcctcatagtatttgtgtcaattttgtaggataaggggtcttaggaccacttacattgattgcttcttctagttcctgaacaataattcccatcagaattaatggggccaaacagcagtgcttttgatgagtaactgatggtattctgccagcaacaaaagcaccaatattttcaatttataactctataaataaggattttttgaaagtccagtattgtgctaggtaaactcagttataattattaatgtcagtgaatactactaaggcctaggccgtagactacttacaagactacttgtggatcaccaatagctcagcaatagaaagtgagaggtagtggtgtgtagtggaatcagattgatcatgattttgaatccaggaatcactgcttgctgtggaacataagactctgtttctttatctacaaaatgggcacacctgtcatgcaaagttgttccaaggaatatgacttgtgtagtgtagtaggttcaactcattggtgtccccaaaatagtagacctcttcactatacagttggagaatcagtgttacaatggcttgcactactgattgtgtctccctaggcacttgtaaccaaagaggaatttaggctgcttctatatagatacatcctacaaagtattatggccatactactcatattgatcatttaaacaatagaggtgaaagatgccaaagttgtggggttcagttgttcacaagtaacggcactgttacttgtggagatggacaaaagggttgaatcctgaggacttggtgatcacttaggcaatcaattcaaggcactagagaaatgtgagttctggtgtctatgaaatagatggagaggacagaaaacatatgacgacatctgattggtttacctaagacttagtatcatttctgggattcttccatgggctgaatgaaacaaaatattgcttcaattatttagaaaagccgtttaaaatctcagttctgatcctgtctctgactcacaaagccagatgcttttccttggttaacaaaattacacagttttggtgtgtacagctggtcatggccaagacagtgtgtactagacatagtgaggttgtgtgtatttctaatattcagtccctcctggagagttcaactggcaaacccattcagaaaggagagaggcccacttacagctgaatacagaccaggccatttaacctgaatcagtcacaatgccctgcgtagggaaaatgacacttcttttcttttataccaaaggccactggactcggtggaatacttaggtccaatgaaatctatagaagagcagggatgattgatttgttcattcaactgatatttgttgagcctactctttgtaaggcactgctctaggctctggcgttagagagatgaaaaagacaagaaatgcacattctaaagtgtgagacaatcaagtaaataggtgatttgcaatatagagtaataaatgctaatatagggtgcaatgggacattctccattgctaggataataacattttgatatatttcctacattatctttatattttcctaattaattaattaatccattcaagaaagcaacatttattaagcaattatagcatagaatgataagtgctatgatgtggcaaatataagattctatagaaatttctctatattatgttacttacattgttctttatattatttcattaaaccattctttcatttgttcattaatttatcccattagcagttattatacatttagaatgtgccagataatgtactacttcccggggatcaaaaataataaaacacttgtttcttgaacccagggagcttacagaaatacagacaagtaaacaggtaatttcaattcagaataacatcctattcctgagcacgttacattcttactctccaggttgggacaaaagggtactacatagtaggttcctctgttgggttacctgtgtcaaacccagtccctttatgagctgtagatccagttacagggcttactctcaaagggattatagacgagtccactcagacctgttgcgtgctagctgtactcactctatcacactttgaaatttatcaccatggcattagatcaagtcagcaagcattgttggagtatccactatgtgctcagctgtgtggcagggaccatggagattccaaataagtttaagacgtaacttctgccctcagagagttcacagtctagttggggagctaagatcacccacaatgatttcacgggcaagcaatacaagatagtttctgatcacctgtcgctttgtagactcctaagaactcctttctcctcctttaatggcagccttacattttatgtagatttgccattgaaccctcaaaatttagtgctgaatggaagatagctcttgtatcagtgtccaaacctagccacatctgaacattgttggctctagaagctaacagaaatatgactttgaatgcagttaggtaggcaaggtaaagggaatggaacactaatcaagaattggaactcagtttacagtattgcagagataatcttgtgtagaattgtatatcattatttacttgtcctctgatgttggctgggaaatcagctatgtggattttgtggtttcgtacacaaatttgaggggcaaagtggaggatgcctttgctgtttacagaagacttttgtagaattattgatgtcaggtatcttttacatattttaaactgaaaggtgaggtttgcattccttggtatcctggtttattttactcatagacttagtgtatatgtgaatgaattagagggcgtgtgtatgtgtgtgtgtatgtgtgtgtgtgtgtgtatgagggcgtagaaaagagtgaagagagaggaaaggaggttgaaaaagaaggaaaatggagaagaaagatagtaggtttgtcagtttgctaagatctttctaaaaatagtccaaattttttgagaggctccttagtaaggcaaatgatttttcttccggtcttatggaatggagacatgcctactggtgtctctggatgctggaaagtgttattcctttgtacagcagcattgctgcattaccatttttgtcacctggctgcagtcattattggaggaagaaaatgcaactcattgcttctactggaaatggagacttgggtgaggcttcttcttgcctccaggaggggtgaaatggcccaaacacccagtgtctttgtgcagtatttttaaattttagttttctgatgttgaatgtttctgagctgacagctgtaagggagtgatagtaggcaaaaacttagagaattccagtcataggtccgtagggatttaaattttggtttcagtctcaatcttgaattctattttctacctttcatcagcaaactgtagtttctttgatatgaggcatctaaggggtgtgtgtgcatgctctgctatagccactcatgcaacagtcttcataagtagtgacgtagccgtggaagagcttgcagaacaagaatgtgtgtggcagccaaattgaatgcttccaattatcctacaaaaagtctgaatgcatggtcatcttagtggaaataatgaaaataaaacatcagttaggctttgaaaaaaaatagcccagtacactttagttcctaaaacagagttttaaagttagagatttgcagtgacttgaatgaaattctgggctaaattagacagccacaaacctatcaggtagtagattcagaaggcactaaaaaataataggtatgataaggctggtttggatagcatggaaatgacacaaagcatcacctctaattaaaagaaaccaacaaaccctttagtgcgcgtcttgtttgtttgtctccttattacagtagggtcttggaatcatttaagtcctatccctaagggtcaaaagtaaccctgaaggagaaagcaatgagaaacaatgcagcccacatcttttcgagcattctcatttcagttttcttcaaaaatcaagggctcaatttctaccagcagtcattctagggccacccattgcctacattgtatcttattggcatgtttcacctctagctgagacagccggtttcccagtggggatgggcttgcaagatgtgttccagaataaactgttcctctgttgtctccatgcaactgccacagaactgcagaactgagttagtttacattagtatctgctaatttattattatcattccttatcggcaattaactggttaccttagagatcacctctctccccgtacaccttcactgaagttgagctcagccagagctcttgctaatcatcctgagatttttctccccaaggggctggaggcaggacattttccacagagggctctaaggctttggaattcctcttatcagaggaccacttgttttgggtccaggtggctccacctggttttttctctgattgtcagtcagacttacaaggtaggatgagctgcagacctctctctccctaaccttgccccagcttgtgctgtggcttgggcttattgtgcccagcgcagaagctaagggcttaggggattgcttgttaggaattaggggactgaaaaaggatgaagtcacctcctggcaaagctggagtctttcaattgtggcagtgctgtggctcttaggcgtctgcctcgagtttcagatgttggcccctctgcatgtgtacctcagcttccaggatttaggggaggccaagcttggttgaatcgagtgtctcagatttgggtaaataaagccgtttttacaagaggcctgtgtgtgagaggtgggaggatggctctggagcagccattttcccccacggagaagaggcttgatttcttgatgcgtgactggctggcctttgatgtgagcctcatttacttcgaacaattgagaggcttgaagtgaaaatcccagaggatcagttgtttgcagagggaaatgctcttcaagttacatttcctatttggctgttgtgtatttagagtagtttttgtgtgggctgcatagtggggtcactcagcttctagtgggtgtacccaggctgctagcacctccctgtgccccccaggggaatgatgaggaacattcctgcagctgtggggacagcaactctgccaactccgggagcttgagctcctgtgcagaaaccttacttgttatcattaggcatattggttaggaccacacagctccacagcatttctagaagaggtgtcagaatggaccagtgtttccactctacagtaatgaaaatggaaaaggcaaatgacttacccaggcacacaacatttgcggccaaacaagcctccattttgcttcacagtagttcctctggtgcagcttccaagcgttttctgtcacataatgaaaaacctgacaggactctctaggaggacctgcgggtatactttcgatggtagttgtgttcctgaaaagctggtcagccaaagggtgtttgttttgtaaattagaccccatgctaatcacagcagtggaattctgtatttaaagaaagcctgtgatggatcctttcataaaggagagtccttatataatgtgaataatcaactcctaactgatttcttttgtaagtctggattttcacatatcttgtttgcttaaaattagattcctcaggccgggcgcggtggctcacgcctgtaatcccagcactttgggaggccgaggcgggcggatcacgaggtcaggagatcgagaccatcccggctaaaacggtgaaaccccgtctctactaaaaatacaaaaaattagccgggcgtggtggcgggcgcctgtggtcccagctacttgggaggctgaggcaggagaatggcgtgaacccgggaggcggagcttgcagtgagccaagatcccgccactgcactccagcctgggcgacagagcgagactccgtctcaaaaaaaaaaaaaaaaaaaaaattagattcctcaaattgacaagatttacaaaacctttgaaaggtgggccaattcatttttcccttgattgaaatctggcccttgaatcctcactggttagccttcctgtttgatttttacttaattaaacaacttgcaactatgtaatatttaaaatatagtgtccagaaaagatgggtacgtgtcattgaaatttaacaagtattagcatttaatatttgcttcagattctaaaaaaatgaaataaaatatgacagctgccatcttcccatccttttctctcctttgtaaataaacccttggctcaaagaacagaagcccatcacgaatttttttttgtcttcacctgtagagctcgttcctgaagagatggcttcccctttgctgtctcagattatgaaagctccccaagtcagtaaggatttcctggattgggtagagcctgggaattactttggaaagtgaaagagctctcttagacttgcctttaaattcagtgtttggggagggagaaaaatcacttttcagaatggggaaaaaatgagaatgagagtgagacagacaaattgacagacacatgttaggtccagctacctacagaattttgagcagaccctttgggactgaagcaggcaggaagcttggtgtcaagtctgtgttctccttgagctcagtgttcatggactagcaccgcggcttctttttgttgttgttgttgagacggagtctcacttcgtcacctaggctgtagtgcagtggtatgatctcggctcactgcaacctctgcctcccgggttcaagcgattctgctgcctcagcctcctgaatagctgggattacaggcatgcaccactatgcccggctaactttttgtatttttagtagagacagggtttcaccgtgttggccagggtggtctcgaactcctgacctcaggtcatccacccgcctctgcctcccaaagtgctgggattacaggcatgagccactacgcctggctgcatcttggcttcttaatgttagatgcttaagcactgtcttgatgtgcatagtcttctgatgctccattaagtctctgagtgccagggtggccagttttcagtttctcccactgggccccatctggccgctgttctgtggcaagctgctctccctcactgccaccagcactggccttggcggtctctgccttctggattattttcgctcccaaatctgatttccagagcatgaagggcacctcttctcagattgtgtagtttgctcttctgagcaaaatggattccctgtgtaagccgacaggaagaaaagttcaatccaaaggccagatccctctttaggggagtttgtgtgtgtgtgtgtgtgtgtgtgtgtgtgtgtgtgtgtatgtatgtatgtgtatgtgtgggagagggagagggggaaaggagagagagaaagaagcaggagggaataaaatgaacattatctgcttctctcactcactttttttgcctctgtgatgatggagcctttgccggctgggctgaccgtacacatgtctatgatattaggtcctcagagcccccttcccaactctttgacattctgctggttgtctccctgaggaaatgctcataagcttagttacagcagggtgtgatcccccaaatgtgaggccatgacaccccaatttgatatagctcaaggatagatctctcagagactctttttaattgagatctcggtgagtaggaagcagccaaataatcattgctgtgcatacaactcagcttaagaataccttatagtgcatattttcaatttattagaaattattttctgaggcttgctttctctttttgtttcttttgggcacaattctgtatcaagctttcctcttctttaattctcttggcttgagggagtctgctatggactgcctatgtgtacaggtcgtttgctataaaaccatatcttttctaagtgagaagaatggacagggagaccctgtcaaactgcattcagagggattggcttaacctttaagaggcttttttataactaaaaatgtccgtaatctagcattcatatttgaaacttgacatgcttgagggaggcagggctctggagatacagggacgaacagaggcatatggctacaggtaatggtgaacggcttgttggaagactgatttcctcctctgttctgccaggcacagaggccatggtaaggacacagacacactgcactcataagactggcattgactatgagcttgctgttctgatcatttctttaattagtgcatttccattttttcaagtatagacttttgagtgatggagtatgctaatggtaacatttgttcctaaaagcttaggggagagaacacagtggcattcgtactaaataatggttttttcgtagtgaagattttgcctgattttaaaattgcaaaataattttatggtagttatggctttttggaaacgaatctcaaatactacatatgaaacaccaattttctgtgtggcttgtgcacttactaatggcatgtgtgtgcttacacttctaggtcattctattttgcctttactggtaattctttagaaatagaaaaagaagtgtgctttgttgcagtaaaaaatataataattttctgaaatggaaagaaagctaacctgcctttgcaaaaactatgcattatgtagtggcctgatggagcaaaaccttataaaactggtaagctataaataccatggcactgggcgttgttggaatgacatccggggcttggtctttgcacatctgatcaccaggtaccctcaagaggagatcatggaaggtggagaaaaatccgtacctgtaaaggtttgtggctatgcatggtgtcatatttggaaatatgggatcaaataaatgtgtgtgatgtttccaacactttgctgtcctcactctttgagcctagcaaactctatcaggacagttttctctagtgtgtgagtgagcccaagtgactgtatcatcaaagataaccatctagaaatctgcagttctgaggtaggggagatcactaccaaaacagatgaaacaattaaaaacctcataaaagagaagctttagtttattgaagcctgttattactagggaaatcagaatccaagacatagagaattctgaaaattccagacaaatgccaaactacaccaaacctgcaacaatatgtgaagagattgggttgggggatctccaagttatctttcagctctgggtgtaaatgtgtgaatgtttgcagcattggtttgaagggcttcatatagctgcctgcattgaagtttgagtccatgtgatgacaatggttgctctgtaggtggtattgaaggcagaggacttagctatggcaggtgaaacaataggtacagcacattagcttttaatgagggcagcatattctgtgtataatctgagttgtgagtgtgcatgccaaaactcagagcctctctgttcaaatatgtcttcctgtccaacgcgagttctgccataaaggcagcaatgggtattctaaccttgcttcatttggtttgtacttgttctagggatgaataggagatgcacgcgtcttgcctggcaaactagacctttcaggagagcacaaattcacttaaacataaattatgttgattatcactctacctaaaaatttatagagctggaagtcaccgagatctccttttaagttgggtattcttgaaaactgttttgtatatcatgataaattatctaaccttttatacagttgaaggccaacattatggaaataagcagctttttattccattctaaggtcagtctaaccaaattatgcaacttctaatgcagttgcttgaagcttccactttgaaagttttttcattttaataccttgcaacagagataaatattttagctactattcatgcttaacaatatatttcactgattgtcattctctttgtgggatttgttggcgtgagaggcagtccaccatgcctctgctcattttgatgtttgttataggttatcagaaaagagccagaattcaataaaaaatgtatttttgttcttgctgttatttttaatttcaggccataggaggctgactgagccctacagaatcaatatatacttggcacttggggtttgacttaagagccaaaaatgtggtagattttcttttaaactagatttgattccagaattattaaacccaatgcatgttggaggctgatggactgcatccagcaggatttggggcactttctgtaacaaagcaatttatttctttcagggagtcactgctacttcaggggaaggtgcagtcggtggggacgcccttggaagttctgttctatcctaggctccctaaacaataatttgtaggagctccttgatggtaggatcaactctatgcagtttcttttggatagtgtcaggtgtttattaaatgtattttgttactgatgactagctctatagtggttatagtgccctgctgttagagagtattcatttattctgggtcaaaccttgccctctatgatgatttgcctccagactttagtgaatggacttactgtttagtagttaggctctttaaaaaaatattttggcttgaaaatatccactcattcatccatccaccaaatatttatagatcatccttcactgaccaggcctgtattcagcccagagagacatagagaaagcataagtagtacctcaccttgtagtttatattgccactgaggagacaagatagaagttaagcacattttctttaagtcaatgagaaaagcagagatcatttactaaatggtgccatgtaattggttaacaattggaaaaaatatgatttatttcccactatatgacaaaaataaatttcacatttattaaagagttaatatgaaaactcaaataataaaatcattagaagaaaatataaataaatatccaattgattttgaagctgaagaggacttcaagagcataaaaacaatgaaaatgagcacaaagaaaaataccagcagctctgactatataaaatttaggaatgtctatatatctacaagtatcataaactaaattaaaaaataagccataagctgggaaaatattttaaatttatagcgcagagaacctatatttattaatttgtttttcagctttattgggagtgtaattgacaagtaggaattgtgtatatttaagatgtacaacttgatgttttgactcatgtatacattgtgaaatgattgccaccatcaaactaattaacatagcctttacctcatatagttaccattttttaaaatggtgagaacacttaagatctactctcctagaaaatttcaggaatacaatacagtattgttaattatagtcaccatgctagacattaaatctccagaacttatcttgtataactgaaactttgtatcctttggccaatatcttcctatttcccccacccacaacccctggcaaccaccgttctgttctccttctatgaagaacctgtgcttattaattcattaattaatgcttcaattatttatagagtgcttaccacatgttagtcactattcaaggtgctagggatacaacagtgaacaaaaatctctgtctccattgagtttacatttttatggacagatggtgatacgaagaaaaataaggaagtatgaagcatacatgttttgtcgagaatgaggattgctctaggaaggtcagggaagacatctcaaataagaggacttttaaacaatacccttatatataaagagctcttacaaaacaatgaaaagacaaacaccccaatataaaaaatgtaaaatgaacacaaatgggtaattaataaagaagccattcaaatggccaatagatatataaaaatatttcaaccatagtaatcaaataatagcaatgaactgctattaatttttaattgcaaagatgatgcctacttactactaaaaagtcaaggaacacaggaatgtgtaaaacaaaagttaaagtctccacaactatttcctcaccaatctgttacctcaggggaatcacagacaacgatttgatatgtaagatgtcattttgtacttatcaaataagcaaagattaaaaaaaaaacagtgatggcaagagtgtggttatgatacactgcaacatggagtataatttaaaaaattgatataatctttcctgggggcaatttggcaatacacattaaaagccctaagatatctaatatttctacttctggaatttatcctaaggaaataattttagatcagcgtaaaaattcatgtacagggttgttaatctcagtataatttatgaggataaaacatcggaaatatcctaaatatcatcaatatgttaatagctaaatatattatgatatatacatatgctagaatactgtgaagccagtagaatgttttgaggaatacttaattacacatgaaaatatggtataatatacattaattgaaaaaatcagaaaataacacacatagattaattccagtttaatgtatgcatatattattccaattgtttaactataatacaatatataaatatatataatatataaacaattccaattgtgtgtatatatatgtgcgtgtatgtgtgtgtgtacatatatatattcatacacacacatacacatgcacatatgcacacacataagactagaaagaaaattaccaaagcattaacagttatctcaggttgtaggaagtcaggcaatttttactttttaaatggtatacttttttaattttccaaattttctgcattgaacatgtgttatttttgacatcagaaaagcaattacttaaattaaccgtaatactatgcagtaggtattaagggccaaaaaggtggcatagacagtttttaatgagttattccgaggaggggcagaccaaaatgttccttattttcattttccaattagatcataccaattttttcttcttaattttcttctcttggaggtctctctcagaaggtaacaagtatgaagttttacattttaaaataactattttatttacagtttaccttttaaatgtgagaaatgttatgaacaatatttgtttcctttttcattctttttgtccttgtgtatactcttgtaaaagtagatttgatttgtctcaccagtgttagacatctagttcacatactttatttttagaatgagaggttttaaaatagtaaaatttaactgcaacttatacatatatttaatactatagaaatgatataggctttatctaagggccacttttggcaaaatatatttttttcagtgcccttttcagtaccaaatggccaatttggagggaagtgcttttttagtattctccaatacttgatttcatgttcttgcttctcggctctgaagcatcctgtttcaacatgatagccccaaccatgtggaacacaaaaaagaaggagtcaatgatttggtggtcattgagatgctaaaaattttaaattcaaccttgactaaatgcactatttgtgttcttttttcaacaaattagaatgggttcaatccttttctgaaaggcagatttatttgattgcttcctcatctagtaacctagttttggacagcataaatacaaaagccaacatcctttggaacacctctttaattgatggctgtataaacttctcacatcctaagcagcacagttaagggcaaaatatttaattcagtggtcctgtgtagatagacatcagaactacttagatattgtaaagaaaattctcatggaaaaaaaactcacacagatgcttcactctccaccccatagccaatgcatgagaaccctgtacaacatcactctgattgtgaatgaaatctttgctacaggaaagtgtctgtggcctaattctgtagtctgtcccttggataaatggagactatgactttcagcaggactatatatttcttatatgtgcaaccatttaactagatgggtttaaatttgaattataaggttttcatgttacagcatggagcatttgatagaaagaaatatcttgattttttcatgtgagtgggcatgaaagaagggtctaaaaattgagggacctcccaccccagcctcctttgtagttcagttccttaaagtaaaagtcttcatttaaagaagtattgagaatgtttgaaacttgattatggagcaacttaagattcatattttctcttcagatggcttaaagttgagattgtttggattagaaaagaatttccatgaaattaaaatatttaattgcagttaagccaggatttggaaaaagttaatgtgataaagcagagtgttctagctgaaaaaaatttatgtaatattatgtaaattcatatcagcatgaaagttaatataaaaccccagaaggtgataagaagatcgaaagcaaggaattttgtttattgaattcaaattctatttacacttgccaatcagtgagggttttggactggctgtgaagagagccctactaagcacacgatgctttattcgatgtgtgtgaaggcctgactctgaacttgcttatgggccccagacagaccaaaaggccttgaggtacccttagctcccaccctccacttcctatggctgctgttcgctaggtcccaagaacagaactgatgggatgatgtgactgaaatgtttttatttaccagtgccgatgagggagatagaaccatgtagggagatatagatacacaaaagctccctgcaaccaatactaatctcaatgagttggtatttttgaaaacacatatattaatgtcatgactaaataaatgcccaataaatgtttgttgaattaatgagaaaaacatccatggttttaatgttttaaaattttagttgagatcattctatttctcttttctcatctttacattatgttataagattttttctttttttttgagatggagtctcactctgtcacccaggctggagtacagtggctcgatctcggctcactgcaaactctgcctcccaggttcaaaagttcctcctgcctcagcctcccaagtatctgggagtacaggtgcctgctaccatacctggctaatttttgtatttttagtgagacggggtttcgccatgttggccaggttggtctcgaacacctgacctcaagtgatccgcctgcctcggcctcccaaagtgctgggattacaggcatgagccaccatgcccagctaacatttttttctatgtcattagagaatatttataagcaattttttagtggctgaattgtattctgttctacagatagggtttagttttactcaaacaatcgctagcattgaactttgaggttatttaaatttttgttttatataaataacaccatgatggctatccttatatataaattttgttgtgatctctgattgtttgcctgtaataagttctctacaagtgaaattgttttatctgagggtttatatatttttaaaagtggtatttcccccagataagttgtagcaatgtgtactcccactgacagtgtatgaaagcccatttcactgtactggcaaaacattattatagttttaaacgtcaccaccaccaatctggtgaagctgtgggaaaacaggcagtcccatgcattattggtgggagtataattttttttttttttttttttggagacagagtctcactctgtcgcccaggtctgagtgcagtggtgtcatctccattcactgcaacctccaccttccaggttcaagcgattctcctgcctcagcctcccaagtagctgggattacaggtgctcaccacaacgcctggctaatttttgtatttttagtagagacaggttttcaccctgttggccaggctggtcatgaactcctgacctcaggtaacctgcctatctccaccttccgaagagctgggattacaggcgtgagccaccgggcccggcctgggagtataaattagtaccagtcccatagagggcaatttgacaatatctctcaaaattacaaatgcatgtacactttgacccagcaattccacttttagggatttaatcttatagatatgcttgaccacatgaaaaatgatgtatatacaaggttcttcattgatgtattacatgaaatagcaacaatggaaacaatgtgtatgtctgtcagtggaaagttttttttaaaggagtgttttatatattgatatggaaaatctctaaatatattgttaactaaataaaaggaagattcaaaaaaaagcgtagggcacactattatttctgtgaaaaagggagggaaaaagagaatatatatcttattggtttatatatacatgaaattgtatggaagaataaataggaaattaattagaatggagacctgttgggagaatggccaataagaggataggggacaggggtgggaaggagaattattagtttcatagatggaaaatgagtatctaattttagtggaaatttgtatttctttgattactaatatatatattaaggtaaatccctggtttaatttattggaaatacttttcttcagtttgttgaatgacttttaatttgttatgcttatttttgacatagtgttttggaatcatatgaaaaaacaatttgtcagtgctttaatctgcgatttcttctgttgcttttaagctattcaactttctaccaacaaagagactatatatataatatttcttccagtatttttatgaattcacttttacattacattttaaattcattaggaatttattttgacatatagttggaagtatgatgtaaaaaacattttcctagatggttaattggttgagtttgtaccatttattgtttatttcttcttcttcaccgtaactttctggtgcttctgaaaaacatgttgagtttttatagagactaggccctttcctgggctattcatttattttccactgatctgtttgtctactataccaataccacactgatttgattattgatactttataatagattttaatagatagtaggtttagtttctccttattctttgtctttaaaaagagtttcaatttttctgtttattgtttcagatgaactttggagtcatgttaagtctcaaaaatgattatgttgggattttgattgaaaatgtaccaaactgataaatttaggaacaattgacatgtatataatatttagtctttttatctagaaatatgacatctttccatttagtcatgtttcattctaatgtcatcagtatatttacatagttctccttacattttttgttaagattacttctggctatttaatggtttcactgttattttgagtgggctctttattccattacattttctaatcaggcaaagctggcagagtacatacgagagctcttgacttttgcatctctatttcgtatggagcgctccatgttttcttagatacggtttgtcacttgagtgttcatgtaatagttattttgatttattgcatctttgcttttagaagttagagtcaggagccaagtggctttagggaaattacttcctctctgtgcctcagctttcttatctgtaaaataagagtaatgggacctacctcgtagattcttgtgaggattcaatgtgagtgttcaagcacctggcacataataagccatcagtaaatgttaagtagctattactattatgatctctttttgactaggaaaatatctaatttgtgcctcttaatctggaaggaggcaatcagattcttactgcctctagcaatgtactgtagagggcaacacaattgaattttgaaattaaagaaaactttcatttgcctctattctgttactgcaaacaaattccacctcagtgtgcttttctgcttttagttacacaaattcctttttacatcacagtattcttttccttagtggctccttcagagtttctcattgttccttactgtgacacccatctctagttcaaatgtgaagtgggaggaggtcctacgtgaatcagagttagctagatgtgctggccagagagccagaagccctcttctgatgttatcccttagtattttctttccagagtcagtggatatcaatttaggccttaatctggcatttttcaacctttctcctgcatgactctgtgctgggtatctccattagctaggaagctctggagatggcaatttcatggaccactggcttggggttgtgacctgcactttaataaatactaccccaagcctttcttatcctgtgacctgctgcttccgcagacctgggctctgtttcagggccactgccttttcttctttctttcatgcaagtgacttacaaatgaattttaaatagccagttcatggtgaggaacttttgagatcatgttcccaggactatgctctgtctcagacatgttttacttctacccaggaaaccagcttcttgtatctcttatccaagaatattttatactcttttctcaattttggggtgaagtgtagtggcctagggcagggactccaatttcactttggcaacttgtggaacaatttatgcttgtggggggttttaaggaagtgctaggtggcttggggagggggagaacaaaagcttggttatctgttataatatttaacctgaatgtgaaatgtgtgaactctgccaaacagagtctcactgtaagtgaagcattgccaagaaaataataggtaggtggttgtgtctatttctttttttttttttaaattactggatattgttcccaatagtcagcagttgagtactaaccattttctgttcatttcagtacaggctgattattttccttctctagcttatagagttgtaatccatgcacgtataattaaaatgatatccaaatgcagttttcctttgaatttgtagtggctgtgtgtgtagggaaggttgttgctttgctataaaccacagacccagagtaaacctcagctgtgctgcagctattttggacgacagctttctagttgcttgtgtgtaattgcccatattacatcatcccaaccattgtgaaatgtgcaaaatacaaggcttatctaatgattcatttcaggtggacagtttcttttaaattaattttaggagtggttctctgcactaaacagatctccctactttgttcttgcttttttgttcaggcctacggtaatttaatggttgataattgatgtagcagagagaagtgtatcatattcattgtgccagtaacctttacagtctacctaaaatgttccatgggatgtgctttctcttggcgtaagtaaagaaccaaggggagaaaaattccctccacagcatatcaagtaagcattaacctcaaatgaaattaatttccctgtcattgagtagcagagaaaaaagctatcttcaacggctacaagaggcttggtcttactggggtttcagtttgtcatattatactgtctttcattatcacagacatatactatagggaagactttcaatgtctctgttggtggattgcactaactcatctttaagtcaggtatgtgaaattcaagtaagccaagaccttccagtttttttcttatcaatgttgaacattcataggctaggtaatattacatgtttagtcacctactagtaagatgaggtgtttacaactaatatttatctttggccttggaccttctacgttgctcacagagtacagttttgtaaaatgctttataggtaatatttcaaagtggacaaaaaaagaagattgcttagaaccagaaaggtcagaaatagatcaaataatcctgggactttttattgctgaataatggactttgtaaatatcacatgtgactattagaccaaatgagactacatagaattcaatattaattggttcagtatccgctgatggcctgtttgcaggattcaatgaaattatattatcaatacaatgttttattgattccttggtttgcaaaattaaataaacatagcgtaagcacttgcagtggtaagttgtagcagggaaacgggttttgatttggaatttgaaaacaaaattaaaggtgattgaagcagaaagcaggctgtggcataacatttctgccagcacttttgaagtaactgaatatatctgggtgtttgggaggaataagaatcagagaacagagactttggaggaagtgtttcaaaatgctttcttaagggttatttcaatactagcaactcattttgttgaatagtttagtttgctttactatggatatattaatttatttcattctatgctatttttttccagtatctatgccattctttgtgttgttctagataatggctaaatagtggtcagcaaaactgacatagtcccctgccttcatggggtggggggacaaaacaccaacaatataaaattataatgctatgaaagaaaagagcatattattatgaaagagtaaaatggggaaactcaacctagtctgggggaagggaagtaatatttgagctgacccttgaagggtgagcaggagctgtgaggcaaaaaggtgggggacaggaagatggttgacggctggctgttgacattaaactcttggcctaatctcagggaaccatttcccacccctcccccaccaaggtggtctgaatttgagtgccaaagtcttgaatccaacacacagccattcgttaaaaaagtggaaagaggctgaggcaggaggtggtggttgtggtaacacacagagtctaccatgaattctgaaaaaatcaaattcatttcagaaaagcagccatgaaaagaatctgtttcaaagtaaagaaagaagcagcctgcagccagcttcagatggatggtttgtggctcaaatccattcctccagttactgctcgatggcccttttgagtccatgccacctcccacccccaaccaatgtcaatgggtggtgtgcagatgcagctcagtaagatagtgttttagggcatgcaaggctcatctagtcacatttataacatagaatcagagtactgtcaaggcaatatttatcattttatattctttcttggctactcttgataaataggaggtcaagggcctcttcctctttatattccctctggataaacagacagcagtctccagagaagaaaggcgtctttccttccctattttctgcttccaatctgtttctttttccctctttctgctccaactttttttctgtgacgttctgtctgacagtcagcagagggcgtatagacgcatcaaaagccagcctttattcaacttggccaccgtaatttcattgtctttatctcttcatctttacattcctcaaaggcagggatacatcctggcgttttctctttgtaatagtaccatcaagggcaaccattccttacctattttataaaggtgggcaaaagctactgtctagataaagggaaagaagttgtgttcctgagagctgggaggaaatgtgtgtgtgtgtgtgtgtgtgtgtgtgtgtgtgtgtgtgtgtgtatgtgacagatctcagagttgttggtgccctacgtgactcatttgggaaggactcgttttgccaatagcaaagcagacagtctgggttcctcttcttctttgctttcccggggctgttgtcctgatagcagctgccctgcttcctgacatgtcctaataatgaagatgatgtggccagggggagattcatcttcttccctaatctgacttcttcattgaattttccccttactgaagtccaaagaggattgtcccctcttaactgtgtgccctttttactctgcccaaggtcagagaatccagctgtggcctgtctgcctcccacatctctggctgcagagagtgatccatgtttgtctgtgacagctgtgtgaatggtacgtgagaggcagaggagagctgtagtttaagctgctccaaagatgtcttggtatggcagtgctgacgaaaggggagacttgtttgtgtcgatgacataatcagagaagacatccatggcccagctgcagggagtgaagaagtgtgcagcttagtatagtcttctgacaaaagcccacacacttcaggtttatctgcccgtagtgctaatctccttctgatgtcttaacctgacttttgttgtagtttgttcagacggttccagtgacagaaagaattgcttggcttgtggtggttatactggctagcacgttaatacaagtgcagggtgttttataaccaactagtctcataataactacacatgaagaacaggcaaggtttagtttagcatattctgcctattggaaagcatcagacacggttatagctcctcataaataatactgatggctcctaaaggccatttttcatgtaaatttccttactgttagtgagcttgaaaaagaaccgtattgacgaacaggttattttaaaagtagaatgattactcaataaaatacttttcagctttttcctttggggctctggggttcccccttatctcaaggatccacgtgggcagattgcatgttagctggagaacccaatagacacattcttatttccatgccagcaaaacactaataatctaaacacaaaggacatttaacacagtaactgtttctgatggagcaagtggtactgccagctcgctttctcttggatggcttctgtacggtgagagcaggattgggagttgagcccaggctactccttagtttgtgtggtataaatgaacaacttaagaatagtgtttgtatagtcagggtcatttctgccctttctcaatggacttgaaatcctgggctgaatatttatccagcttggttttgtgtttttggaacaaaggaaatttccagtgaccagtctggttaatcaccaacgcttattccctcttcaccactatttcgtattggatttccttctataccagtacattggatttccaatcacatcgaaccctatttggctgccttccattcacagaagattagattcccttacacctcactgcctctcaggatttttctctccacaacgtgtagagtattaggttcccttacatgagttgctgcttgttaagttgtgttcagtgctgcgtagtatcgaattctctttctcatcagcagtcactgggttgttaattacacacttgcagattcacttctcctgcacatgctgtgacacacagctctccaaagctctgaactcacacttcaatgccttagccatatctgcccagattcagtttacttcagctgtgtggtattgaacacctatgcatcagtctgggctagatactgcggagtttacaaaaatgagtgctgaataatccttgccctcaaagagtttacaatctactggggtggatccagggcagggcagtgcataagatgaagaattatgtgcgtgaaggttaagtattggttttactcttttcctagaaacagtttagtatctggcgtatttaaagcaccttagaaggcaacatgttcatcataatgccattattgccaccattctgttccataatgggaagaaaacattaaaaacacaattgtgtgaaaaaaaacccttttaccaggttccaatgcagttattggtagagttggtagaaaactcttaggtctcttaacaaactcttttaacagccctgccttcatacagacttaagacagtattagaaatcatataattctaagagacataaattaggcatagagaaataaacattgctatgtagactgtgctctaacatgccttgacattacttgcaaactaggatctatctctgttgtatttcttttggtaccaaaatactgtgcaattttattcacccctggaaagagagggaaccaaaagtaatacaaagtggagcaagtcatggtttcccacaagcaacagaaagtggagaaggcattaccagttgtgattttattgctcagcattctcaacttcattgcaaattcacaatctagtgtctcacaatggtgtaaatattgcctaataccttcttcatgtagcttctcattccttgaatgcttaacatgtgccaggcactgttccagatgctttactgtagaatcccagttattgctcatcataaatgaatcttctctgcatttgctgtagataaagaaaaaaatctaagttactggcaacaaagggatgtgtttttatccctttctgccaattcaaccagagcacttcattaatgccaaatttctaatttgatgtgaacagcactcctagcatagtctgaagcttgaaatgacagtgatttaaaaagaaaatagtttagaaaaagacctagctaataagaaaagctatttgctataggaattcagtaaaaacccaagctttggtttaagttttttctttaacaataaaatattgtgtcattttaaaaaaaatccctggaaggaagggaaccaaaagtaagtcaaagtggaaagaggtcacaggaccaatgcttttgctgtctacccaatcttttctaactactcatatgtattgtgtgtctaaaattcagagtatgatatctgtcttttcttttttcttttcttttctttttttttttttttttttgagacggagtttcactcttgttgcccaggctggagtgcaatggcgtgatctcggctcactgcaacctccacctcctgggttcaagcgattcacctgcctcagccgcccaagtagctgggattacaggcatgtaccaccatgcccagctaattttgtaatttagtagagacggggtttccccatgttggtcaggctggtctcagactcctgacctcaggtgatccacccaccttagcctcccaaagggctgggattacaggcatgagtcactgcacctggccgatatctgtattttctaacctaattgtgtagcataaagagactttattagtatggaaaagtgacagcaacatttagaactcatttttcaaaggtgtgttactattcaaagcctttggaccatagcaccatttcattagaataatagcatgttgatcctcaattgaaatgccctactttcttgtccatggttatcaccagtagtcagggaggttttcttttccgaggcttgtctttaatcatatagggcttgggactgtactagttcaaccactgtggaagacattgtggcgattcctcaaggatctagaactagaaatatcatttgacctagccatcccattactgggtatatacccaaaggattataaatcatgctgctataaagacacatgtacaggtatgtttattgcggcacgattcacaatagcaaagacttggaaccaacccaaatgtccatcaatgatagactggataaagaaaatgtggcacatatacacaatggaatactatgcagccataaaaaggatgagttaatgtcctttgtagggacatggatgaagctggaaaccatcattctcagcaaactatcgcaaggacacaaaaccaaacaccacatgttctcactcaggtgggaattgaacaatgagaacacttggacacaggaaggggaacatcacacacctgggcctgtcttggggtggagggagggggtatatctaatgtaaatgacgagttaataggtgcagcacaccaacatggcacgtgtatacatatgtaacctgcacgttgtgcacatgtaccctagaacttaaagtataataaaaaaataagaaaaaaatcatatagggcttaatatgaacatctagacacagactttattcttccctaatgctgtccccaaacctttctggagctcctgctatgtgtaatgtagcatgttcctaccttcacaaacattcctgccagggcatgtacttccatagctcaaatatttcatttttttttctttttttttgagatggaatcttgctctgtcgcctgggctggagtgcaaaggcatgatctcggctcactgcaagctccgcctcccaggtgtatgccattctcctgcctcagcctcccgggtagctgggactacaggcgcccaccaccatgcccggctatttttttgtatttttagtagagacggggtttcactgtgttagccaggatggtctcgatctcctgaccttgtgatccgccagcctcggcctcccaaattgctgggattacaggcgtgagccactgcgcttggccaaatatttcatatttcatcttcttttgaatccaagacttgtaagcataatttatggatgatggcttcagagaaacaatgagttacaatgtatcttatgattccttggacatgccttatttaatggtaaagtttccattttccccctgttgctcatttttagctataaagaccataatgccagtcactgcctgaaatctagccaccccctttcacattaatattaatagcataatggcaaacattctgtacattgcctgtgactcacataatcaccatgcaaaatgcatcattcataaattgtttagtgcgacctttggcacagtagcactaattattattatcacagaagcccagtaaactagactggtaattatcagggatttatttgaatggacagctaagctattcttggcaagttagtcaaagcagttgtcatgacagccatacaaatatgtcttatgaattgggttaattagggtaattaataactgttatttgttccccttttcccaagatattgcctcagcattatcaaaagggtgaggggtgtaaactttaaaataatgcttgaatccttctgctaagaaagctactgacgaaatcaatgaaagctacctaccttccaaaggtgctcccttagagaaaccctcatttttatgggaccttctcctacttttggatgtttcagagtcagcaagcacaagccatactgaaaaaaagtagttaaaaagagaagctaaatagtcagttccccgaggctgctgctttccttttagtcacctgtgagaactcccaagagaccatccctctggcttctacttttagcagagccctgctttgttttttgctcatctagaactttcttgccttgctctgcagcctgttcattgtataatttttttttcttatttttccctcacaaggaaattctgagtttttctcacccacatttctgcccctctgaggttttccaagttttaattttgttggaggccttttttaatttaatgccttagggaccatctaacattgcctgatggtggttttgctcttttttcgaagaaaggaaaataggctagctctgaagagctttctctttctcttccttaaaaaagtaaaggataaaagtccaagtttcttctctctgcatcacagcatattaagttgtttttcttattctagtgcaaagaagagagaaagggagaggttaaaaactgaagctgattcttttccccaatgagatgattctttctttcagagtaaatgttgttcacaaaaggactttaagactttttgtgatggttttgaacagcaaatcaatttctctccatttcctgcataaaactaggagaaggaggctgggggaggtggctcacgcctataatcccgagggaggctgaggggggcagatcacaaggtcaagagatcgagaccatcctggccaacatggtgaaaccccgtctctactaaaaatacaaaaattagctgggcgtggtggcacgcgcctgtagtcccagttacttgggaggctgaggcaggagaattgcttgaaccccggaggcggaggttgcagtgagctgaggttgtgccactgcactccagcctggcgacagagcaagactccatcaaaacaaaaacaaaaacagaagagaagggacacaaggcagaaagagaactgaggatgttaattaaacatctaatctatgtcagtttctgggctcagtacttttcatatattaactaatcctcccaacaactctttgagactggaaacattattatcctagctttacaggtaaataaactaaattatatgaaagttaagtatttttctgagatcacacataaacaggacttgaacctcaagtctctgatccagagtctcctttcttctacaccagctagaacagagtttccccaaaaaagcaagaggcttttagtacttcatgaattccagatgccttgctcacgccacaaatttctattgaatataaatgcccatttattttgtttgtttcaatgcctgttcagcaattgagatttctaggtcagtgccagcattctggctgacccataaaattcaagtttgggaggaattctggtaaaatgcttttagcagagggtgttagattaataggttagaaaaagtgccaactttcttcccatgtcatactggaatctcatgatcagaaggtagcttcctctattttactttcagttgccctgttagggaagaaaggctttctattgcagaagtggcttggtggtgcttggaagctgcacaggatatatggaagatggagtggtttagggttctccaggtgtccctgtcctactaagtcagagatcaggatcaggttctgacatcttaggaagctgaaaactgacacacagagacccatttcttttttctttttttctgaggtggagtcttgctctgtcacccaggttggagtgcagtggtgtgatcttggctcactgagcctccacctcctgggttcaagggattctcccatctcagcctctcaagcagctgggattacaggcgtgcgccaccactcctggctaatttttgtgtttttagtagagatgaggtttcaccatactggccgggctggtcttgaactcctgacctcaagtgatccatccgccttggcatcccagtgtgctgggattacaggtgtgagccactgtgcctggcctccatttcttgatatgttattattaaatgggccatggtatcatatatttagtatttttaagttttgtgtgggtgtgtgtgtgtgtgtgtgtgtgtgtgtgtgtgtatagtcatttgtctcgtccatgaaggaccttcattcacttgataaacactttgtgccaggagctgttttcagggttccaggaacagcagtaaactaaacagacaaaaaattcctaacatcatggagttaacattctagcaggggaagagagataataaacaaaataaatatgtgaaatgtatggtattttagaagataagtgatatggagaaaaataaggcagaaaaggaagataatgagttttggagaaaatttgcaaatttaaatagggtggttaggtaaggcttcaatgaggcctaattttatttcttaccacttcacacacaaactttcttctccagcaaagcagatggttcattcattcattaatgcctactctacctacctttatatcctaccaggtatagaatacacatttaaggacaaaacacacttgcccctacccttttggagcccaaagtacaggagatagacgttgaaaaaaataattacacagataattacttgcaattgtgataagtgtgatggaagtagtagaaagtactaacacatactacatatggaggccaatacacagctactaattgtattaagctaaaagccacagatggaccaccaaacatttggtatccctggattctagtaggaaggaccacgatgacatgattacaaagccacaagtctcatttggtttaacctgtgtctagggatctgtgaatttgtgatttcaaatgtttgattgccataattttattagaaaccttcagcctccaacctaggcaattactggcatttgagtttaaacacatgcatacacacacacccacacacacacacacacacacacacacacacatgcacacacactgttgtattctttggaaaacaaatgaccttttgatttggtgtattgtggaactgctagaaaactggcttagaaggagggaaaatgttaatgaaggtaatggctgatttttagagcagagtacctatttgttttttcttgtcctttcattgtgcctccaaagcttcaaaacctcctaaaaatgaaagattataggaaaaaatgcatcttttactttttaaatggtagacagcaaagtattttaatgaggaaatatattatattattctcctacaaaccaagggctaatagtctggaactggtactttggctgcataaaaagtccagcaagacaagccaattatggactctgaaacatttttatttttagttccttgtaatagcgattcattctctgctatggtacattaactgggaaacaagttgaaatgagagttttggcaactttagaataattgactatatttaccaaattcttaatcgtgcagagaggttagcaggggaggggcatagaagaacaaaagattaggtcagggaaaaatacgtctaggagagtctgactttcaataaaggctaaatagacagctttagaatacagttttagagaactcttttttcctttcagtttattcttcaagtagacaacagtttggttatttgtgctgatttctgcctttatgtatgatgtggtgttacttttgtgagcagaagtaattagttgtttacaaatgaagaatgcagtaggcacagctgtgatattcttttccctaccacgagatctggtagtccccaaatttccctctacatctgtgtgcattggtaacactgttaactgctctgttccctttcttttccagtagaatttcttttgtttgggatgactgttacttttccttttggtcctcttttccttcagtggctctgcttgcctatctggtggtcgttttggaagttccaacccagcaccaatccagagtggagctggtgatgccgaaatggaaggagtgtttgggaagggtagatatgttatgagggaatcacgttgaagttaaatgaaccgctaaaacaaatgtaatcttaggcctcattaaggaggtatagttttctgattataagaggtattagtccctctgaattctttgctgttaagactacatctggataatgatgtctgattctggatgccttattttatgtgaaacactgacacactagaatgagcttcaagggaggttaagagactgataaacggcctggagaccacatcacttgtggaacaatgttcatactgcttaattatgagagaggcaaaaagttgtatgaagccaaccttaacattgatctgcagtaggcaaatgtgttgaaatgaagagactaaaactaaactttcacaaaagcatgacacattcttcttagtgtttggcttgttaattagttacgttgagtacaaatatttatagtatttgagtctaggaccagctaactgaccagcacaacagctttcacatactcagcaagggcaattcgttcttaggtataaggccaaagactgacccttgggtgatcatggagatttcccttccctttgtagagtgctctgtatttaatcttctaatcattaaaaaacagatgctcaccactgacagaggtggggttcctagaaaagatggactgatggctgttatgctgtcttccatcttcttgagacccttagcagctttgtagtggtatgctttagtggggttaggaaggagttaatatcttggaaaaaccttggatgtggcttgatttcctcttaggaatattgagaagatgaacacatagtgggaaatttttaaatttactggtgctacaggcttttttccaaaaggcatttgtagtagtaataataatagtaataataatatgcccaaatgacagaagaaatattaacttctgaaaataaaatttcaaaaggcaaattttataatatggttgaccaccttattctttttagatcacctagggagaggtcattcatacctttatttattaattctctatcttctcatgccttattgatttacttttccaaagcacagcagaggaaactttggggggaagagataaaagtaatccctgtttgcacagcaacacaatgtgtacattgttggcttaaggcctgtggtggacagaaagactctggccttagagtccttcaggccctcttatccaggaagagaagacacagaaacatcgttctcagagtagagacagtgtttctgagcgacccaagatttctcgtttcttcttgtgaccttcttcctcttttgggcactgaatggggtcaggcctctagggatggcacacagttagttggtgagagacaggaagggactcagggtccagcagctcctggaagggagaaaggtgacccagtaacttttcagcttcttttggagaaaaggcacagtgtcaagcaatcaggagaggaagaaaacaagcataaaatccacatccttaaagtccataaatggtgaaaggaaagctctctctgctccccaccaagtgtggaagttttatggtgtattctctattcatagggctgacagagagtgggactgacctgctcaggaaggtgaaggtctccacctacaggctgctgcaggaaagagctcagtctgcctttcctatccttgacaaggggagtagagccagttttcagaggctatccaagctagggttgacttgtctcaggactcatctttatgcaaagtctgcaaaaagaatttgaaattcatgaacatctgaccactggagaaaacctttactggctcaaaaaataagtctctgtggtttaattagctaccccttcggatattgatttttctagcacttgtacagaatgtaactcatcttccaaactttacggaagagccaacccaaatccagctggatttgtggctgtagagaagttgcttgattttattaagcatggcttacgttctgtctttctctctcccctgacatttatatgtaacttgcaaaatccaaaatcacagctagagagaagcaaactcttcccccaaaccaaatattttccctaggtctatcccccttagatcatatagtctgagggcacttctgatggcatgtgttacccatggaggctttcttctctgttgctctctcctccgtgctcccatggcacactgtatataccacttgctatggcctaaatgttggtgttccccacaaatttatatgttggggacctaagacccaatgtgatagtattaaaaggtggagcctttaagaggtgattaagtcatgagggttccacccttatgaatgggattattggccctgcaaaatggctccagggaaccaaccagcacctttttgtccttccatcttctgtcttgtgaggacacagtgttcctcccgtccagagaaagatacagcaacaaggtaacatcttggaagcagagagcagctctcatcagacaccaaatctattgataccttgatctgggacttcccagcctccagaactgtgataaataaatttcctttctttataaatttcctagtctcaggtattttgttatagtagcacaaatagactgagataccactatggtagcacttacaaccctgcattataattgtctctccatttaactgtccccagcactagaaatgtgaactccttgagggcaggagtggaatcgggttaatctccagatccctagcgtctcccatggggcctgacacatagtcttaacagtatttgttgaattgaattaaattatttcagccctgagctgtacaagctgtcatttgttctgcaacagtcagtcgaggacagctagggagcatgaggcaaatcttttcaattgtggggaagcctctgaatgatctgtttttgcctttttcttctacccttctcatcgattccatctatcccttttcattactggttgcctgcaccttgtgcaaacagaagtcttaaacagtgcaggatcttcagtgacttttttgtcttttgatccggggctgatggcttttcattttactcatgctttatatggcatagtcaagtctgattgagacttatttggtggtagggcagtcagaattactggtagaaaagaaatgcaattttattactttcaagttcatagaatgagaagaagtagactaataaagtctgtgccaggaagttttgccaagtagaagtccttggacttgttttaatgaataaataagaatgatgtgcaattaacatacttattgtttgtaaattgcttctaaagtgcctaaaaacaatttattcttgttagtttaaacattttccttgtaaccttgtttataccacaatttgcccagcaaacctttataaaaatagaaacagcagcctagctctatccgaatgctcaccaaatatgaattactgaaatctgaactgcaaaggtatgactccaacacgggaaagcaagtaagcctgagatggatgcttttaggaagtgagcagaacagattttcccttttctacttaggtgttagttgcaaaggcagaaggttatagttagttgctcagtactatttagagaggaaaaatgctcccttcaccagggagcaatacttgtcatcattccagctccccttggtggtctaatgccagagagtttctttccactgaggcagtaaaaatgagaaaatttaccttttagataatttcactacgatcaaacaatccccagtgggcaaaactaatagaagatactgtattttgattgcagtttatctctagcaattataaatgagcaatttaagtggcaacaaagcaagttgtttgctagaatgaggccgtatttcacagagctttatcattcaatattctctggatcactcagctaaaggcagtctatttccttgggtggatcatacatcctctttctacagtatccctaggaacaattacttttcttaatgatagggtattgagaagaagtgatctacaaacataatttacactaattttcacttttttcctcccatgagaaatttagttgacaagactttgagtattaggttttattcttccaggatttcttaagagaactaacaagaaggagctgggcaagtagagagaatgtcagaagagctcagttctgaatccatgcctgagtttccaataaccagctgcgttgctttgggggtggttgtaagtttctctgggcccatttccttatcttcaaaatattgtgtgtgtgcacgcacacgtttgtgtgtgcgcgtgtgcaagagagataatagattagatgaactctaaggtcatattgaattttaatgctttacgagtatatattctgtgattgttcatgagcccaaaggggaatttttcagtttttcaaagctttcagtggacagcatagcattgtcaggttgcagtaatgatttcgagaacctttgcaaatgactacatttggcaataaagctactgtaggctctaccatggcctgaagaaataattaatattgcataaaaatatatattttttaatttatgaaggatagatctcaaaagggactatagattgaaagcagaaacagtaagtgagccaattgggcttccattttctactgtttataaatttagactgggtggaaggtcccctggtttggaaagaaggagtcttaggttcttgctctgactctgccagtaattggctatgatcatggattcagaaacttttgggcctcagtttttccatctgttaaaaggggaaaggagtattttgcctatatacatctgcagactgttgtggttattagaagggagcataggtcaaggctttgtaaaaaaaaacaattgctatattaatgcaaggtgttatttgagaaaataatttttaaaattgggacattgagatacacagttctacaggtgtttctcattgtgctagattgtgaaacattgtctttgaaggtgtggattatatcatgttcaatattatgtatattacacattggcatttcaatggaatgggaatagagggatggggaaacaacattagtttggttttgacttaaagccagttttttctactaagttcttgggaaatgttgaaagaaatacaagtctaggaagcacatcagcctttcttaaaagagctttgcaaactttgcatttctgattcaatctatgaaagagacaggtgagaggttcctatcagctgttaatcagttaaccaacagtgggtgagcatttagccagtgccagggacagtgacaggcactgaagataccaatactaaaggtgtggttcttgcccttaaggagttctccaacctagtgggggtgagatataactaagcaacacaatgtgttaggtgatgtgatagaggtaagtatattccttatatttccttaggtaacatttcagaaccggcgaatcctgggtgacaagcctccggtttctctctaaggtactgctgtccagtagaactttctgtgatgatggaaatgttctatgtctgctctgtccaggacatggtagccacatgtggttactgagcacttggaatgtggctactatgattgaaaaactaaaattttaatttaatttaaattttgtgaatttaaatttaactagctacatgtggctaatgtctatgctattggacagcacccccctgaggaatggtagtgtgagcccacagtcaggctccaaggaggtcctgagttggatcatagaaagctctggtcaatttgcccctgtcctttaaccctgttttcctatccaaatactgcactagcccttgaatggctcctttccagccgacaactctgaattatgcatgctaatgtgtgttactcaaccatggcatgaggttccctcactcccctcccccaaccctgccgtaaagaaagggtactctgtgacagttcaatcatgatgaaggaagaaaatgggtcgaagaaaactagtttataaaagcttttaaaatgtctgaaatcttgcttttcacataatttcagatggtgtgaggtaatttcaactctctttaagctgagttttagctctctttctctctccctctccctctctctcacacacacacacacacacacacacacacacgcacgcacattctacctaaagtgtctgctgtggtagatggggctccttgtattcctattgaatcagcaattagagaagttgggtatataatatatttattttatatatatattatttatatatataaaataaatatattatatataaaataaatatattatatataaaatatgttttatatatatttatcatgtacagaatatatattatatgcccatatatatatatatatatatatataaaacttcccatgccaaaaacacaactcttcatcacattattctttttctgatagcgtagataaagggagactgagataaaatatcctagtaggaaacctcagaaagaaaactattcacaatattcaatgggagtttagttggacatagaaataaatattcagaagaaatcaagtttacgacctggtaagaagacttgccatttgtctggtgattcacagttttggaaagtgcttgcacatttggtcctaaaaaaaaaaatcccctagaaggtatttgggacagatattatttccattttttttttttttttgagatggagtttcgctcttgttgtccaggctggagtgcagtggcgtgatcttggcttactgcaacctctgcctcccgggttcaagcgattctcctgcctcagcctcccgcgtagctgggattacaggcatgcgccactacgcctggctaattttttgtatttttagtagagacagggttttatgttgggcaggctggtctcaaactcctgacgtcaggtgatccgtccaccttggcctcccaaagtgctaggattacaggcgtgagccaccgcactcggctgatattatttccattttatagattaggaaatcaagagtcagagaggctccatgatgtctgcaagggcacacagctagtaagaactttttctattttcatcttgaaggctctgtgattggaggctttgtaggatttttcttttacatttttttcttatgtgcttttttttttgaagcttataaccatctgcaagaaacaatcaccagagtaactttttttttttttttgaatcggagtctcgctctgtctcccaggctggagtgcagtggcgcgatcttggctcactgcaagccctgcctcctgggttcacgccattctcctgcctcagcctcccgagtagctgggaccacagcacccaccaccacgcccggctaatttttttttttgtatttttagtagagacggggtttcaccgtattagccaggatggtctcaatcagctgaccttgtgatctgctcacctcggcctcccaaagtgctgggattacaggcgtgagccactgcaccgggcccagagtaacttttgaccctaaatgaagctgggtctaccaggaaccaacatttaaaaatacctatacacaaaggtacatcattgtttccttcacaaaaattatatataatatacgtatatatagacacacacacacagttaagaaatgactgcccacacctgtttctactggtttagccccgataaaagtgtttctttgctatcaaatagacacaggtattgagccgaccaggatgaggaaagggtgtaccagcttccttcgagagaaaggtgtgtacataagagtgaaagaagaaaggggtctctaaacatatttgaaaaattgaccaagagagagctgtggagggaggaagctgagaacaatgtggggaaaggaaaggacacatcaaccacactggttgaggagtatgctgtctgacacagtacagcgttatgtttctgacagtgttaacttttgttttttgaaagttaagtttaaaattggtcctgatttttgctgctgggagtctgatggtagaggtagagtgaggtgttcccctcattatttcatttcttaatcttcctgcaggaggaaattgctctggttgtgttcactgcctttgaacctgtcgtgtttaagcaggctagtgtattttttttctcccaaatagtatacctcgtcagccagtcctatttactttgatttcactgcattttccagaatcctaatgaggtgtggcctagtggtgtgagcgcaggacctggcaggaagactctcaaattctagttgcagatgctagatgcttctatgtagtagagggcaagtctcttgacctcttctgtaatgccgttaacagggttaataatatttatttagctcataaaggcagcagggggattaaatagttaatgttgtttaaaaggctttgagaaaaagaaaaggcaagtttttttgtattgtgtgcattttcaaatgctaattcttattaacaggaagcatctgctccattacggtcattcagcacctcatgaaagtcttgctggctggatgggaaggaaaattcttcaattttgtgccatgagatctgagaaaatgtagctaccttcagccccagttatgaacttggatgtctgttttctccctatctaaaaacattcttcttctttatgtggtttttctaaggtttagtagtttttctctcttttgcaatcttttatgcttaccattactggtgcaaaatgactattgtgtttcagctgtggggggaatgaaccctttttataataggcagttagacattctggaagtctttgtgataaaagatttcatagaaatacaaggtgcttcagtaattgttctgttggtgccttgcataactgcattacagatttctaatactctggcagtttcaagatgctgatgatattagccactttgtgaagggtaattatggctttctatgcatggttgccagcactctcatgtcagattatagtagccttttggttaatctctattttaaatcagatcaaattctaacccaccctcatccctcctcatcccccttcccaaataaaatgagaagcactgtgaggatttgggagaaggacaggtggggtattttagagaatgagaaaacatttctattattattttttgagtcatcttcttattgcttgtcagttatggtttatgaagtgatgccaaagtataaggtctatcttgcctccaacgctgatttgctgcaatgcttgtttaagttgctagaaactggaggctcctgtgggtttccttctgtgcctaataatttcaacagagccaaatgccctttatttactacagtcataattagagggctgccagtgttaagcaaccatggaatctgagtttgagaaatgtttattgtgcctcattaaatctgaaatgagtacttaaaggtcagaaataaataatctgtttatattttttgtgacagtaaatataagtgaatgctgtgtgtacatatccttgactctactcatttcagtgtactgagacacccctctgtttgccaaggcagtaatcacaatatctgcgacaaaagagaactatggcaggtttcattgatcacaaacaagaaaatgatctattgtattgtatctaattagaaaacatcaatattagaagctaatgcattcactgtttccaagatggtctatcacttgattgttttttgtcagcatgatcacattttacgggcttgagcaacaagctggtacaagggaaatgaatttagaatgatatgccaaaggctgttgctccttcagtcttaaataagcttgtagaggcaactgggtttttagtggcacataatataaataatgggattggggttggaacagaatttgggggtgttgttttggcccaaaggcacaaggccacccaccgctttctctctaaatattttgaaagtcttttcagctgacaaagcttactcaatagaaattgtactctgcacactccgcaggcagtcagggctctgtagctggtaagtggcagagaactgaggcactgatataatagaatttagcagaaaggaatggaccagctcaggttctgagggtgctagtccttctgtgagccagaagggctcaaaggtaggctggatccaggagagctcatactgtgggtttctggatcccattgcttgtgggagattacacagacacacacacacacacatacacacacacacacacactcttatatgtgtgtacatatatgtatatatattatgtatatgtatatatgtgtatatttatttctttattagagatgggctctcgctatgttgcccaggctggtcttgaactcctggccttaagcgatcctcccacctcagtcttccaagtcattggggttacaggcatgagccacaatgcccaaccctcttgtgggagatcttatatgggtttcttattgtcagtttgaccagctttaccaaatcatagcttctaaaattgaaaccaccatcatgactattaatcttacatcttaggtcaccttctaacaatggttgccattgcctctaaagggcaaccaaaatggtcaccaaggtttcagggaacaaagtggctcatttctggatcccttgggctctgtgagtaggccctccagctaggtctggagaatgatttccagttagtgtgtgccaagtttttcctttgtctaactgctggactatagtcccctgactctttcattggaattagccaaggaaatcactcagagaaacataggtaggaagcaggctaatcacttccctgatgttactgttttctgattgcttcctatcccagtagcagaaaatgccaaaaacggtgctcctggggtttctcttattgtccttgttgcggcatgctctagctgagttagtacttaatgtggctgtagcacttaacgtgtgtgtttgttttcatggctctttaaaggggaaataacagttggcacttgcttgtaaagtgctttgatatttggggatgaaaggcactctgtgcctgcaaaatagctttaatgtgttgtagttacatgtttggtagggcgattggactccagaatttgttccactggcaaatgtggttgagagctatttggttctccattaagttctgtttacatgggattaaatagtttgacttacatgactgaatttttcattttatttgctcttgaggtactcttactcatactgagatattgttgattctgcatttgtacatataataggcattaactggttccagagagctttctataagcagatactatttcagagtgcactatgccccacaaaggacttagaaaagggtcgagggccttattcagaagcctgtatttgttttatggcatggtgtttaagctcgtctttcagcaggctttgaattgtatggtttactgcagacagctgctaggtttctcaaggaggcctctgtagtgaaattcacaactgggttgctcttctaaaggcataactttgacccaaagatgagagcaaagaaaagtgctttccctaagccatctttgccacctctaggtagggtgaccacatcaatggtgccagtgaaacaataggaatgacgatgagaggctgctaggaggggaattctttcaatttaatttgttgaatgttaaccacatggcctgtgtttctcattgatagtcctgtcctgacagtcactgggatgctagagttgtttaccacctgtagaaaagtagctgccacactgtccgtctgtgactcagaggtctacattctggtgaaccctcgtcttctcacagaaacgctatcaaattgggttcaggaacactatcatatgttgtcaccaccattcccagagatgtggcaggactgatggagttagatgggcagaaggcacctaactgtgtcatcttatccctttcagttatatataggctattgtgtatttataaggtagtagttgggagtgataacagtgaacaaattgtaactacagaaggcagtgtgcagagtggatgctttctgaagaagtagaaccaccttggcctaataaacttcgtcacctgccttaattgtgataagtagcctcattcttaatcccttccatctcttctctgatcattcattgatgcattatatgaacgcatgctaaatgtttagcgttgtggcagatggcacagggacctcaaaagagagcttccagtcccgttgagggatgaactgacacactacacatgaaataatcatagaacctgaggaaatgcataattacattgtacagtctgtatacaaagtgctgagaaaatgctaaggaacgtgggatgatcagtgatggagatatattagaaatgagggaaattagatggcttgtgttggatgactgcttagctaaggacttcatgtagatttaatgttaattgcaacaaggagctactgtaaggtcttgaaaagagaagtgatgtgatgaaaatagtgggtgaggaagattttccaaacagcattttgcagaatgaggtagaacaaatgcaggtgagaaaaaaatgacacaaggtgatgaaggctgtggaaatggagccaaaaggacagataatatgggctatttctaagaacgttatgaattgtataacctatttgataggatagggagatttcttgccttttatgatgggggttatgtacatatgacacatatgagggccaaattctcccatgtgagtcacctacagccattgagccattagggtgttatttagttctacaaagtagcagtgtaattctccaagttgcagtccagtagcctgcgtacaagtatatgcctgtatctgcaggtacataggtgccagtctgtgtatgtgtatttacctgaatgtctgacattttgatcatctctggtaaaagatccattagtttgtgagctccttgaaggtgcaggctatttttttttaattcccagggtttggttcatgcttactggatagataaatgaataaattaagaatcactttgttttagaagcctagaattgtggagcttgaaggcaacatggagtccttttggttattctcctcattttaaagaaagataaattaaggcctcaagagggttaatgtgattcatccaaggtcatctgtaagttaatgacaatcctagggagagaatccagctgtccccactataccacattgctttctgtagtcaaactgtgtgtgtttgtgtgtgtgcgtgtgagtgtgtgtgtgtgagagagagagagagaatgaattagggctggggtgtgtggggagcatacaactgacaataagtggttagtaggagtttacctagcacgttttctagttcagggcaaatatgaactttgtaatgttggcagctggggatggtgccttttattccaccttcactaattcctgcttcagttgctgctgtctggatggatgagtctttgaatatacattctagctggaggcacgtcagctttatttttatacagaatttgcatattcatttttatgtgttgggggtaggaagtaggcaaaaactatttattatctcatttccaaaagccatctttgtgaggagatgaccatttgaacatctaaaacagcaaccagctttaggaaaggttatgtgtcttttcattatggatcaataggcacaattatcattattggaagtcagcagttaaaaaaagaagcagcgttttataatcactttgttgtgtatctgatacgggattccagttttcctgttttgattgctaaaatgacttaagagttaaaaactttaaaaaattaggtagcaaattatagttataatgcttttcagctcgatgggactttaaaagtgtaacttaaaagttcgttcattttcaaatgaaaatctaaagatttgagtaacctcagttttaatcccaatgtctgcaaccttttttttttttgcttggtatagtgacctgggatttgtgccactggacaaagagtctagtcctggatatctgcatttattgggcttccttctccttaggtttgaagtctctctgctgataaatgtggtgctgagagagctgcagtcactcttctagagactagggcacgattcagtgaactgtaaaagtaatgcaaaatgacaattaaagtagggcattctctggtaccttgggggcctgacaaagtggaagtatttgacttctgatatgccagacttactaacgtagaaatgtaataacatatcccccacccaaacgtcttactagaatcctcctatatccagaagggacctgagaacagcaagtagtaagcaaagaaagctcccaagcagctaacaaacaaacacagaaacaaacaacgaaaatcaaaacattgcacaaaggtccctatattaaagatcatgtgatttcccccttaggagcgcaacatctcagctgtctatgcagaacgttacaactcttttttttctagacacaaatataattgtatagtttccaagaacacagtagagtaaaagcatcaaacttgaaatggaagaaaagctacttttgatataccaacagcactgaaaagttaaaaacgctgtgtttgatagaaggttggtgacgatcctatgttaaaaattaaagacaagaaaaaaaccacagcagtttggggtccttgagtatacaggcaaaatctgcatggggtaataatttacatttataaagatgctcctaagtaaccaataagtggttaaattatgttttttataccctattttaaggagggcaactttgtgatatgtttcagaaacaaggcagatggttaggattttaaatcaaagttttggttcttaaaggataacaccctaagctatctggaaaactgagctgtctagaattatttattgtttgagaatttttaaaaatcaacattttattaaacctaggtcatgtgagacacctgctttcagtgttatacccaaggataaagaattcgaattagaaaaagaatttgtgataaatatactaaataataagaaagtgactcttatttaccactgagatgaaataaaaaagtttgctctagacccatttttttttaatgtgacaattaggtttttccaaagcaaatgttgttcttatctctttgctgtgttcttgtgttaacctggctgtctgattagaaatggggacatttcctagtgaaattaatgtgacatttagagaaaatttcctctctcaaatgtttcatgttgtttgccatttagcatacttagagaaggtattggaataatgtcaagcaaattttgattaaataaggctaactaggagccaatacattcatgcaaaaaaaaaagctcttgtattattttaaagaatgtatttcttctgtggttctttatcccatattgagatgaccttggcaggtaatctgacaaaagaaatgacatcttctaaacagctgggcttgctttagaaaatgcagcacattaggtcagagcctgtggccagtcctttgctcaagacagttacttgccaccccggaggtacactaaaatttcctggaaagctttttaaaaaaatcacccagtgcctgggtccaattccaggctaattacctcagaatctcttggagtgggtccttggtgacagtatttttatttttatgttttacaagaagaagattctgagatgattctcatgtgtagttagggctgagaaccactggcttaagacatacaaactattcattaagaaaatatttccttcttcaggatgatctgatgatctgagtctcatcctttgctccaccagaagtgtgaaaaaatatactctctcagtgcacaggagttgggtttgggcatacaccttgaaccagtatgagctagaacacttgatgtcagtatacatagacccataatataatagcccatctatggccagttaactcagttgtttggaatgtagtactaatgaggccagaatagtgtattctatccaattagaataattctgctgcatagatttttcccataactgtaacccaactgcctcacaaagagacctgagacggattacaaaggcacaggacaatgggtgaatcagcatagccccatccattctgggaaaatcggttctaggaacctgccacattgactagcgctactaattgcattaggatgcagcatgagacatctgcccatgatggtttgtgctgatttgggggaatgatatattttcatttgaaggtcaggacccacaagaatgggtggtttattccttttggagttaaaaaaggaggataaaagataggaaggttacaagcttctatgatattcttctctttacagtagcagatcatgcctggcacatctgcctggggttaactgacctgtatttgggggaagaattgttaaggtaattactaacaagccctcgagacttgtctcttctcaactcagtgcctgggagtgggaatcctcatgatgagatatattatggcttaggaccaagaagtagtattttcattagtgatacaatgtgcatggtattgcttctttgcctgaacacgtggctctggcaccatgcctggaggtcaggtctccgcggagcttcatatttgatgcagagtgcacacaggttccatgccttcatttgcaaagatatggaaaattttctacttgagaactgtcttctttaaaggcagtaaagacagattctttaaatacagtagcttgggttgctgcttatccttttcctgcaaagccagtatcctctagatttcctttttgtatttttgtctctttaccaatcttcttgaaaaaatgatttagtttgaaagatgagatggaacatgcatgtgccactattttattgcctgaatgaggtcaaattcctgatcctacttggagttagttgcaggttctgtataaagcaggggatcaggattcccaccattcctgtcatgggtctgataaatgcagctgaaattctcctttggattcatgttctattatccctattttacagagagggaaactgaggcatgcaaggattaagtaatttgcccaagatcgcagagtgaaatgaatatttgaactgctgagtgcttaatcaattccgggttttaacagatgtattagtccattcttacattgccctaaagaaatacctaagactgggtaatttcataaagaaaagtggtttaattggcccgtggtcctgcagactgcacaggaggcatgatgctgacatctgcttagcttctggggaggcctaaggaaacttacaatcatggtggaaggttaagggggagtaggcacatcacatggccggagcagcaagagagagagagatggggaggaaggactacacacttttaaataaccagatgtgataagaactcattcactatcgagagaacagtaccaagagggatggtgctaaaccattcatgagaaaccgccaccatgatcaaatcacttcccaccaagccctacctccaacattggggattataattcaacatgagatttgggtggggacacaggtccaaaccacatcaacagggtagcataatttttgtggggtagtgaacttcccacttgttaaattatatattgtactgaatatcgtagatgaacacatttaaccaacatcatttttacctgttatgttggtacaacgaattaactcaaagagtgtttgttggttgactgactgttggataaacttcttccagcaaatacttggattgtattcctaacacagcttccaagtttgcctcctattcctgtttgtgacaatttcagcattcactctctatgaagaaaccagaaatgaactgacccttttgatttttaatcccccaacccatgcttccaatagcattaaaaattgcttgagtttacattaaaaaggagatataaacttctagataaaagcagtgtgagtagatattacacagtgcatcttcaaatgaggggcatgggtgggcacatgaacatacctgagtaagtgcagggcaatgttggggtttagtttccttttaagtactgtctcctcctctctctcacacattcaccgtcccccttcctacctattgtaggcacttggggtctgtattctgactgctggctgtttggtgcccatgtggtagctggatctgctattgcctgttctgttttcttctccatcaaactgtgagctccttggaagcaagggctgcatctaggagcctagtacagttagtatctgacaggtagaggtctgagaggaatctgctcttttgtttgctagacagaaattgtgtttccttttccaaacactcccagttgaagtaatttcagaaggctcctaaggaatggtgggaacagtggagatttctagtgggatggcaagagggtgggggagatgtgtttgggtagtttctagatcatacaatggttcaagaagagtggtactttagtgctgggggcgagatccactttactaggacattcagttactttagtgtcgacttttctctggatttcacccttctaaggcttttcccctctagttctcccaacctctgggtgatcattagctgtttttccatctctttcatctggcaggtattctgcatttgcttttataaagccattgctccagcagtctgctgtaaccagattaaacaggggtgctctaatgataggagctgagacaggggtttgcttgcaaacttcatgtttcacatgaaaggctttggcaccccctgtggactgcccttcaccctgttttaggcatagtatttgtttgcttttgtatctgtgataaaacaaaggccttcctgcataaccagtgctgagcaaatgtcttgaaacaaagggaagtgcagagtttaaatccacagtggtgtattaccttgcctgcatttccatatctttggaataaatattttaacatgttaattatctactactaataaaaatacctttgaacttccagtcaatttgatgggccatagaattgtctccactggggaatgggaagtaattagtttctgtaaggattgtaggtcacgttgtctcttctcagtaagtggttgcatggtcagtagccagtcatattctagggaatgtttgtgccaaggccgccctggtctgcagcggggagctgctgcctccacggagcccctagggcctgaaggaggcagaggctgctgctgcactgtggccttgggttccaattcactcactgcttcttgacccagaagaaaaattccttctaagtagggcagttcgaaatctacttatgaatcatctgtgtaacctttttaattttttcttctcattgcagactgaaaactattcttttgactccaactacgtgaatagccgagcccatttaatcaagaggtatgttggtttgcttgcttattgctgcaactaagcttgatttaacattaaaaagcaaaacagattaaaatttttaaaacgtatttttttgggggattttaaaatgaatgtccaacctactatttgtagaaagtttggaaaattgagaaaagcataaaaaagtaaataaacatcactggtaatttcatcaaccaaaggtaatcactgttgacattttacatttcttggtatgaaaatgtacgtataaacactcaacaataaaattggaattatattaaaatatagttttatctagtgacagaaatctgatattacaaatattcactatttctaatatttctaatttctaatattatttctaatatttctaatgtgatattagaaatatacaatagaaaactttcacaatcatgttgataccaaaattcttgttgctcttcactttaaataaaggaaagccttaaaaatgtttttcatgtagaacttcccatgagttttgagattgatgctatttcaacaactttgaaatcattttaaagatattttaatgacagagaagccaatcctttcctttctagatgagagagaaaaagaaatttgcctgattcttcttaaaatttttagaagtgtttcagaggaaacattcaaagttgagatttatgtgattggttgatcataatttagtatccaaggagccataatggatgtgagtacagagctgaatcctgccaagaaagatcccatctggtgcagtgggctgcacccaatgggagaaggacaaggggtttgggaagccctctaaaaggtggaaactgagcaaagaagagaacctcttgcacagaaagaccagtcctaacctttcaaatgatgcctgtattgctgtttcatgtaaatatcacttaaatggtccagtggttattctgcagctaaaattgaactctgagtatgtttgttaaaataatagaaatgaaacagagaggccagcagggtatgttagagctgtagcagagaaggcttgcaaattgtattattttgctggctctaatcccataaatttacatcaccagaagagtagaattcaaggaataaacaagcttcaagtaacttgcattcatgtctgatttaattcatgaggcttcagtaacccctaaaacatgctaagtttatctgtattggtctggaattgcttgtgaccttaagtgatgatcattagttgtctgaaaatgggtagcccttgtattatcagtgaaagcacagttgagaattttttttgaggggttgggaggaatccatttagaatattttcctgggtcacagaataaaagcaagaggtgaggaattcaaaattatctgacgaatttgttttagaaagaaaaaaataaccctcttatgtgcactgattagagtgcctttgtagcagaaatctgctttgtttctgcttccgaattgttattttcaaagctccattttaaaactttgataaaaacagtgacttgccttaccctcacaggtccctcgggctaactcagggtacctgggaattctatagccaggttaaacagataacatgatgctgggcgcagtggctcatgcctgtaatcctggtgctttgggaagctgatggtggagaactgcttgaggccaggagttggagaccagcctgggcaaaatagtgcaacccctcccccccaccccccaccatctctaccaaaaagaaaaataaataaataaaataaaaaaacctgatagtatgagtctgattgtcacagcctggaagaaagctaagactcccagggacccttgcatcttacatcagtcctgactatccaatttacaaggtagactgatagataaaaacttatgtttgaacatttatctttggggatacatgtatttccacagcagcgttgagacttactgggaacctctgattttggttaattactttatatgttttttgtttatagacacatacacacaaaaggcacaacctagacttaatgggctcttggtgaaaaagtctcctgattttgcatgaaatcaaagatagctttttcttcttttttttaaataaaaccagggaccaccttgatgaagaggaaacatctgaaaactcagggacacatgcatttttgccagggttctgtttacagagccatgagagctttgggaaactctgaaggccttgaatttgtgtggtcaattgagtttagatgaagcataatacctagaaaaatacagggaatcttgtgtgctatgctgttctggggaccaactgtgttaaatgtaaaatgtgtggaaaatgttgagagtggtggctaacaccaggtgataaagtcatgcgaagcctgttcaaatagctcacaacagtgtttgaaaagggttttgctgtatgtggtttcttgaagatccatttacatgcatggtaaacgctcttggccaggaaattctgaatctgattatcagttttaattttactatcaagtccctgtttctttgaatgccaatacaatacaatttcaggctaactttgagaacttctttttctttctttctttctttttttttttttttttttttgagacggaatcttgctctgtcacctaggctggagtgcagtggtgtgatcttggctcactgcaacctccacctcccgggttcaagtgattttcctgccttagcctcctgagtagctgggattacaggcatgcgccaccgtgcctggctaattttttttttatttttagtagagatggggtttcgccatgttagccaggctggtcttgaactcctgacctcaaatgatccacccaccttggcctcccaaagtgctgagattacaggtgtgagccaccgtgcctggctgagaacttatttttctatccatgttctcttcttctattcactttctacttatccaaggatgtttcttggacccttcttttcggcattctctagcagttgttagcattcttagccagactgtttacatacaggcatcttttcctcttttacatctatctaccttgagtagttgaacagcagctaccactgtccacctctggttctttccttcatcagtcagggttcctacatgaaatagttggcacgcctaaattggaatggcttgaggaaagtttatttacaaagaggaccatttacaaaggcttgggcacggttagtgaacctcaagggatactgcagtattatggcactggaggagctaaaaatacttcagacaggaccagggaagagagcatgtagggaacattgacttgagagtaacagtgacttctggttggccaagggatccagtcatcatgaagtgaccctggaggaagggagcagagacaatcaatatcctgatatcactgtcctcccctgctctgatctcccgctgatgtcttcctttggctaaacccaacagaaagccagagggcaagggggttctcataggcacaaatcaaggttgagaaggatctcaactgtgggaaaaggaagtgatatggcaggctccccataattttatgcaccaaggaatctagcattatatttctgtagttttttttttttccagactgtcacttgcaacccgcaggtgtacccaaggaggcttatgtgagggccccagattaacaaatcatggcagtgcagagtttcttctgaatggacttccttcctgctctgtttgtttcttgctgtcttctcagagcaaggaaagccagcagtggtactttgtcgctgctgcagcactctttcctcatgcctgttttgtgggctgctgtctgatatccactcctacagtgctttgggaacaatatcaagcagggcataaggctgtggcccaaagaaaatgaaataggaaatgaacaaagcactgactcagcgtggaaaggattaggagctttggctccctaaatcatgcacaatgctttctttttccacccaaattgtcctggggtttttccagcacttcgtatggtgccttgtatataataaatgcttggtacatgtttattgaatgaatgcatgagagaaatggaagaaaatcttagcatttttctattaaagactagcactagatttctctttaagccagtgatttctggattttaatgtgcattggaaacacctggaaggcttgttaaacgcaggtatgctagctccatccctagagaacctccagttgtaacaggttcccaaggtgattgtgatacaggtggtccagaaaccactctaggattttccttgtattacttaaatacagttataataatcttcattctcactccttgctcattcttagcctcagatatcattccctgggtatgtagtatcacctactagtaagatataacctgtttccattctgagtcttatgtcttttggaaaagagttctaatatttcagatggtaaatatgggtcagaatttgtgtgatgttcattcgtcatgcatctgctgagtaactcttctgtgcagaaccctgttctaggtgttttcaaacatatctgtctttttgttggccaccagagcagtaatagaaacatgggcatttacaataccattggaaacaggaacccctaatttattgtcccacaaaagttgttttacaagtccttcatctcccaagaggtatgcaggtaataaagcaagtgaaatcagcatttttatgcctggcataaattgttatttgttttgggtgagtagccatttaccaggctattttacaatatgtggcatcttgctcactgggtcttaaactgccttacacaaatccattcattaaaccactaaatgctcttacaagatcagtgtaagtggtgcttagtttgtcagatgggcaaactaatctttaaatgagttaactattccaaggtttgggggagttgttataccttgctttttgttctgagaatacacaacttctcgtgctcacactaccagtcccttacatcctagtagctaatccttcactgttttattatttccataatttctattcaaaaagcaaaatctctgaggttgtttgtaacattcagatgcctatgaaaaagatgatcaattttttaaaaggcagatccaaaaccaattaggagaagtaaggtagacatccctggcatccagggaggtaactgactgcaattaaacattacatttatgttgaagtttttgagaagtgaagacaaagcagtaagtacaccaagtgatatagttttaattattcattaaaggaaggatggccatttgacaggagaactattattttctgttctttaatgttagaagaaattaacacacacacacataatagtgtgtgactattgtttacagaagatatagaagtgttctttaaatataaattttctgtaccaatcctataaaaactatggacataatatttaattgtaactcagtgaaaacattactacacagaataatgatggtattaaacaataaccatttatggagcatctatgtgtatctggtacttcatgtacagagtctctttgagtcttctaaatggccttgtgaagggggttttagcaaacacattttacagataaagaaactgagattcaaagacatcagatatcaggtccagggtcacacagatgaagtggcagattatagattattacttgtcctaatgactccaagttcagtgctctttactacagtctgctatagaaataaagaacctagagcagttgttctcaactgtggggtgatttggcaatgtctctttggagacacttttggtttttttcctttaagtgggggtcactactggcatccagtagataaagggcagggatgttgctaaacaccttataatgcacaggacggccacaacaaaggattttgtagccccaaatgtcaatattgccaaggttgggaagccctgctccaagggctggttaattacattgcccccatactagatccctcaccatcatatgtttcaagcaagtttcaacagctgctgaattcagagttgaattctctggcttaaagtgacaactttgtgttgtggattaaggacattttcagataccagaaaatatacaggttggaaagttaagtatttgttataaaaatggacctgaatatcatccaggcaggtcatttcctttctccagaggtacaggggtgcttgtaggcaggcactcacctcacgtgacagagaataatttctaaaaaacaaactttacatctatttaaactgtgggattataatagtatttacagaaaactccgtaatatgtgccataaagctagaaatggtgaaacactttaaatcatgtgtttccaattggccatcatggccataaaagaactgtaagataatttgcttgtttgtttgttttttaaagaacggcatcctggtgggtccataaggctgagttagctgtgtgacataaattgaaggagctgagtgagctggcctattgagtaattttaattttagtgcagttgatgctcagttattctttctgaaaataattagctaacaggtcaatgcttcactctctcctgctcttcattttcttataattatggctttccagttactggcctcctggtctttcctttttatattcaggtcagcaagcattctacatctaggttggtcatatgttaaaaatctgctgtgattcttcttgactaagtgtggagggtgacaatgtatccattgtgtccatggcatagctcttcattatatgtgctgaatcttcttatcagtctcagagagccaggcctgtgaatgtccaaggttgagcagatcaagtgagtttgcggtgtcatttccacagggctcttttctcagaggcataggtctattagggtttgtgttaattcacaaacatgccattcttccttgttgaggcaacaacacattttcttgagtgtgcctttgctgcttcctcaccgactagggaatggattcaccatctactaggtatttcagatgcataatttatggttcatggtgtagcaaagctggggattctgtcaggacatacaaagtattagaaatagtaggtgggtgccctatagctgtaccttatgcattattctccatttcatgagaaatggtgtgaagttcttggattgcatgcatagtgcattgtatggtagattgatttaataaatgcaagaatcattttacctatcaacacttgagctgaaagttttcatgttcttagtataactatactcagagttgcattagtgctcactctctggctctcacttttgtcttgccttctatattagtcagggttctgcagagaaacagaaccaataggcatatctaaatctataaatatgtagaaagagttttattgtaaggtatgggcttatgtgattatgggggctgaggaatctcataatctgccatctgcaaggtggagaaccagggaagatggaagtgtagtttgaaggcctgagaaccagagagccaatagtgtagattcaagtctgggtttgaagtcttgagaaccaggagcgctgaaggcgggagatgattaatgtcccagttcaagcagtaaggcagagaacaaactcaacttctttcttaatttttgttttattcagtccttcaatggattggatgatgcccacccacattggagagaattgtctgttttactgagtctgccagttcaaatgctaatttcttctggaaacaccttcatagacacacccagaaataatgtttaaccagctatctgggcattccatggtgcagtcaagttgactcacaaaattaaacatcacaccttccacgctcagctactgactctcctctttttctttgaatatgttcatctatttttctcagataaaactgacttactgggttctctgatcctgataatccttcctattttagttgcactacttcaatttctgctacctttgctttttacagttggttagtagacatcttttaagaatcagtgtacatagtggttaaatttctaggcaggctctggagctagactacctgttttcagtcttaggtctgctatattttttaccagctgtgtgaccttgggcgagttatctcacttccatgtacctctgttttttttcatctgcaaatgagaatattagtagcacctttctcttacagagttgtgatgatttcaacagttaattaatgtcaaacacttaaaacagtgcctcacgaatagtaattgctcagtaaacactagctattattattttactttgattttataggaagagaaaagtcttctgaaatgatgacattctttagaggcagttttagaattgtagcttcttccaccttgtctgtagtgatgcattgaagataagtgaacgaaaatattagctgtatcagcatccaatagtgggaacctctgtgcaatgttaagttttattatctttaagcacaaatttctcttccccttattcctaccctattggacagtctagccactgtttgcctcattacagagccgacatcatcctggctcagaaagatttttaaaatcagatctgtcacggtcgtaaattatcattctgtcttcaacccagcagctccaccttcaaggacttagagggcaacagcctgaaggatagtggacatgaggagagtgaccaaactgacagtgagcatgatgtccagcggagcctgtattgtgatactgctgtcaacgatgtgctgaacaccagtgtgacctccatgggatctcagatgcctgatcatggtaaggactggttggatgtaagttgcagcaatcgactccaaagaacccaaaatgtttgtaggcacactatactactttgcttaatgagtgtattatcaaggtgtctacagagctcacacctcagcagcatctacaggtttttgagatgtcctgacacctagccagattcttctttgccctccctaagtggatcccctaggtctgtataaagttcaggcactttagaagctgactacatgtgcatattacatacattttcttcaataaaactgcactgagctcataggagatgaacagatgccttctctccaggaataaatgcctatttttgctttagtacatgaattcagctgatcaatcgaattgcatagaacacagcactaatgagaccaaaggggtgggttttatttccctatcagactggttagctttacccagagtgagactctgttctctcattacagattgtgtactatttactgaggatagaaaataccaaacttcccattttgtctatggggctgctatgccaaatccctccctctagcttccacacaaaaccatgccattagtcataggggagaccagggtaagagaacgtggctgagtcaatgtaaaatattccgttaatgtgaaaggcacctcaaagcacatgtcaggagtggcatcctcatgtatgaagaagagtctatttctgtgaactcggaactcagccacacatgctttatcgagaggcactatttaaaactttgctaggcagaagccagggtataaaaacattagcagagttcagctaaggcagaatgtttagatggacttgggcacaaatgtcattttcaatattttactgatgcaaacatgctatgcaaacagcctgtctttttcaattaagaaatatgaattcaacttggtggttaggctcagtgaagcttcagaatgcttggctatgtcttgagaaaagctagactcaagctcagctggaagccctactgctaaaagacttaaaaatgagaaaacaaaatatggtgattatgtgctggtcttcagctgtttcatttcactgtaaacatcattaaatgcttttgttttggtttttggaaataagtccaaaggaaaaaatgtactatccacaaaacaaaatgtttttcatggaaaaaaattagtcactgtagattctattaaattgtcttaatccattccctccccagcagacccaagtgtcaaagtctattatatagagaggtcactatgaattgtgcactgctgtcttccctaattggtgagtggtgacatctgcagagataatacactttctgggaaaccttactatgactaaagatgaaaaaaattaaacagttatataactgaaacagagacaatttaatactcagaggattagcagtatgtcacaggatgcaaactgatatatatcatttactagttgtgtgtttcaaagaaatgctttttcatttatatcaagaaagggttttagttagatgctctctaaaatgaaatgactccaggaaaggaaatagtcataattgattctcactttatgcctggctagaacaacatctgttttatttttttgtcacatttctctaggaaaacagtatcagggaactgcagctagttttttctgagagagtgtttcttacaaattggatgtattacatatatatgtgtgtgtgtatatatctatatatgtgtactgtgtagattggataataagacgagtattcttttttgtgaatgcatacctaaattttatttcagcttagtcatttgggttgaaggtagagaccaccagtctccatataggtagagtgaccacataacccagtttgccttgtatacctcactttacatctgtgtccttggcataatcaataatgagaatattctaaaggaaatgtgtggcaatactccaagattcccctacatataagatgatgattttacacacacacacatgcatacacacacatacacactttctgctgggccattttggcaacactttcacattttgtttcttactatttgatttgcatgtgtgtatcttcattttttctattattccggcagtggttaaaccttgagccaacccttgagtgagttcttttcaacttgtgtgattgcctaaagtttaggtacaaaaagaatttgggccttgtttatacctcagtctctcccttgtgatatcccactacttctgaagctttctgtaataatacttgtgtgtcccatagcaacttcaggcttgccacagattccatcaccagttcacttggactgatactgcaacctcaaaaaagagcaacaattccaacaattaacatttcatagcattttaatatctcaagtctgcatttgcataataagtatatcacattttatcttaaggtacagtggttgaaaggcagtcactgggtgatccaccatgcatgcctgatcttatagccattttagttagattgtcccagggtaacatggtattgttgcttcaaaggattaccaatttagaaaggtgagaagggaaaatagaatctgcactggactgagacctgtactgaaaatctcaagaattccttgaggagaaaaaaactagtccccaatccccttggttcattgacagtgtgatgggaatcttaaacccaagtgttctgaaattcttggagttccagagcaactgttcttgaggtttgggtaggtgtcactggagcagaatgaagaatgtagtgaatttgtcaggctaactctgatcctggtatttcttttagtcctgccagaaccactccaaagttgggccaaatgtatccaacaagagcgtaccttacacctttgttttggggagtttggctcaccttgtattccatgtctgtagttctctctgtgacttttctaatttggatattagtactgcatatttccttgcacgtatgtggacacatgattgaaggggaatctcagaatttcaaaataaagataattttgtgcatctgttagtttttcctttgagcaggaatggtttgttcaaggagctggtattgtgttgcctgtgtttggggtaaaggtataaactatatttgctcctctttttaagagatacctgggccctgtgcttttccacactgccaaaatttctatgggatttgtccttaagattttattgtagcagaagaatgatcggtgtgaatgacaagggtgctttgtgactctgagtaagggcccaaattccttaattttcagtaacccttctctgagaacattcctagaggtgggaacccagaatcactatatttaatgaaggaaggagaatgttatattcaataaaggaaggagaatatctagaagacttctttttttttttttttttttgagacagagtctcactctgtcacccaggctggagtgcactggtgcgatctctactcactgcaacttctgcctcctgggttcaagcgattctcctgccttagcttcccaagtagctgggactacagatgcgcactaccactcctggctaatttttgtatttttttttttttttttttttttgagacggagtctcgctctgtcgcccaggctggagtgcagtggcgggatctcggctcactgcaagctccgcctcccgggttcacgccattctcctgcctcagcctcccaagtagctgggactacaggcgcccgccactacgccccgctaattttttgtatttttagtagagacggggtttcaccatgttgggcaggctggtctcgaactcctgacctaaagtgatccacctgccttggcctcccaaagtgctgggattacaggcgtgagccaccgcgcctggcctagaagacttttgaactcaaagggcaaaagtcaggtatttagtcactaggaagtttggattatgtgtttccttttcaatttttaaaaatgtctaaatttattttttattttgtttataattgacacatcataattttacatgtttgtggggtacaatgtgatgcttcaatacatgtatatgttatataataattaaatcggggtggttagtatatccagcaacctcaaacatttatcatttctttgcagtaatagcttttaagatcctcttttttagctatcttgaaatatacaatgcattgttataagctatagtcaccctactatgtatagacaccagaaggattgtgtttgattgtccaaccagacacattcgtgagctcagtgagggtggaaatgagagagaatgacaggaatctctgctttctggattactgtcaatcttggtatttctcttgacatgcctaagaccaggtcagttggttgatgaactggctaagctgaatttcctggttgccagctgactgaattacaaattgatttgttatccagtgcccatgaattaatacgtttcagtttgtccttagtattcagctcttgttatggcttcccagaaaagaagatgatagagaattctttatcctgtgctttctactggtgtattgtagaatggcaatttggaatgctgtctcttaatagctctgagtggcttgagaccaagtaagtgttgtcattggcgggttttaccacttgatttggttcttgaggcaatttggtgctgagcttgggagtcaacactcaaattttttaactgatgccttctgtccctgagggaattacttggcttgagggagtctgagttacctggtaaaattaccaccctttggtggggataagaattttgcctttatgcggttcctgcagagactctctaaaaagagtgattgacaagtagagtagtgagaggtgccagaggctcatgggtttgttgcgtgattaggggtatcatggggcttgaatttcttcctatccgggttatctctgagctaagtagtgggggctggggtctggctccttcttgcttctttgcataacaatttttgatgatgtggatatcccattattcttacttaaatatgtaatcctgatatgagattggggtttatagggatcatgccctagaagtgtacactagtcccaagctcagctattttgtttcaaattacactcagtccctctttccttatggttttaattattgattataaattcatcagatgaaaagatgactctaattgctctaatatgcacccaatttggagttcgctacaacactgaattggtttccctccatgctaactgataccaaatggaagcaacttacagaatttttttgtaagatttagctgcttttcatatccaaatgcgtccaaatgcaatataatgattgctttatttctggaagtatagattcttctgttttagtagacttgtttatttaccagtttcatcacctgaatagcatttaacatgtttgctgtgtataacatggatttgaagaacttgatctgtacctaatgcaactgctgttaacaaatttgccatgaaaatgttctgtaggctgcgtactatgcttattctagtgtcaaccacaggtatattaagatgtttacactttcaacactctaccaacaatatgtaattttgtttcctctagccatttaaagaaattatgattccatgactgaacatccttcttttatcttcttatctgtcccccgactcacctctctcctcactgaattttgaaacactcatttcaattagtctcttggcaaaatagggagttctcaatggagactattttgtgtcattgcaaagcagtgtgctgctgggctccagatatggtagcatgggccagatgttcatagagtaattgaaaattccattttatcagaatagcatttgctgtcaaaaagttttatctttacgtgaacaaagcggttgattagatccccctggacctgaattagcatctttgaggctagatacactgttttgcaattcatgtggttatttctttcccagttttgctcatatagagactttaaaaaatgtcttcatcctcttgcaaatatacctagtgaaatttaattacttgaacccaggaatgtgtatacagcgtttctatatatgtgatttccagctgctttcatcctgcctctggtatactaggcaggaataaaccatgaacagatatatatcactcattactcagtaatatttttgagtgcccactatgtgcctggctctgggaattgaatgtgtcaactactgctgttattgactgtaaaagttgttatctttttacttttattaatctggggtttactgaggtgaccaaggccagctcaatgatgaaatgaataattctattttaaaaaattataagaatagattttggggccattaaaaaccttgtgaatattgtgccagtaaagcaagagaagcaatatgaaaagactgttacaatcaagatcttattttcaatgggaatgtcatgaaatattcctcctttgatgttctaatttggacagtatcacattggtaaacatttttttttaaaatccacctgttgtgaggttgaatttcctactcatctttggttaatgtcattgtaggatgctaagtttaatctctgacatgtccaattaccttgctggtttagaggcagtcagtagcactcaatgcctagtacccctttttttctgatgcccagaaactttatcctttctctcagtctcagcagtttttgggcaggtaggaagagaggtgacaggtggagctttttcttttttttagttcaaaaccaattatctgctgtaccacataattggattttttccaaggcaacatttacattttattggaaaaataatcactaaaataaaaagttgttcttcactaatggaaacctccctgttgttagaatttctttgctagtattcttttggcatgggccctttggtcaaataattgttttaggacagttcaccattggtttcttcatgcaggacattaagaataatatcaaccgtttgtctaattttaaatagatacgctattgtgttatagcatatctatttaacatattgtgttatagcatattgtgtttcccaacatatatatatatatatacagacatatatatgtatatgtgtatatatatgtgtatatctatatgtatatatatcgggaaaacacatgcacacacacactatacacacacacacacacacacacgttggttatatatatgttatgcggttcctgcagagagtctctaaaaagagtgattgacaagtagagtggtcagaggtgccagaggctcatggatttgttgcatgattaggggtatcatggggcttgaatttcttcctgtctgggttatctctgagctgagtagtgggggccagggtctggctcctccttgcttctttgcataaccatttttgatgatgtggatatcccattattcttacttaaatatgtaatcctgatatgagattggggtttatgggaatcatgccctggaaatgtacactagtcccacattcctggattcaagtaattaaacttatatttgcaagagtatgaagacatttgtaaaagtctctatatgagcaaaactggggaagacataaccatatgaattgcaaaacagtatatctaacctcaaacatttatcatttctttgtggtaatagcttttaagatcctcttttttagctatcttgaaatatacaatacattgtttctttccatatgtatatttatgcttgctttcttactctctgtatatgtagtgtgtgtgtgtgcatgtgtgttttcccaatctacttggaacttttagttgtctgatattcaaggttattttaatatttattattactaataattacttgtggtgggctgggcatggtggctcatgcctgtaatcccagcactttgggatgctggagcaggtggatcatttgaggccaggagttcaagaccagccttgccaacatggtgaaaccctgtctctgctaaaaatacaaaaattagctgggcatggtggcacatgcctgtaagtccagctactcgggaggctgaagcacaagaatcacttgaacccatgaggcagaggttgcagtgagctgagattgtactactgcactccagcctgggtgacacagtgagactctgtcttaaaaaaaaaaaaaaaaaatgaagaggaaaaaaacaaacaaaaaacgaaaacaaaaacaacagaaaaaaaactacctgtggtaaggaattcattactcatcaaaaaataaatgccaaagcttttcttgattagttgacattaagaatttccatatttttaagcattttgaaagcattagaggatgcaggatatgtaaaaggagcacaatgaacaattaagaatttcattctccagtagtttatggcccaacagcaaaaatggtccagtatggaatagactacataggatcggtgaagaaagtaattaagatttttgagctggagaccaaaatgcatttaaaaggacactttggtgtaatgtgatctctttggaggaatggtggaagccaggccccaacatagtatgctagataaaattatgctctatttgggtgatttactaggtgaatgttttccagtagcttcatgaaaaatcaacttctataggccatgaaaagtagggacactgccaataagttaatagatgagagacaaatcaagttgttttgtgggactttccctttctttctttctttctttctttctttctttctttctttctttctttctttctttctttctttctctctctctcccttccttccttccttccttccttccttccttccttccttccttccttccttccttccttccctccctccttccttccttctttccttttttctctttctctctctcttttccccttcccttctcctccctcctttcttttcttttcttttttctttctttcttttctttttttgagatgggtctcactctgtcacccaggctggactgcagtggtgcgatcacagctcactgcagccttgacctcctgggctcaggcgaccctcccaccttaaccttctgagtagctgggaccataggtgcatgcttggctaatttattttggtagagacgggattttgctatgtttcccaggctggtctttagcccctaggctcaagcagcagtcctcctgctttggcctcccaaagtgctaagattacaggcatgagccaccgctcccagcctaacattatttctgtcctgtcataagatgattaagagccataaactcttatcaggatgggaaatgataaatctaaacatggattttaaatatttgtagagtatttttttctgtttattttcctcttaatccttttgttatgaaataaatatggggaattaagtccattcatagccagtttaagggattgataccaagcattttttttttttttttgagacggggttttgctccaggctggagtacaatggcacgatcttggctcactgcaacctccgcctcccgggttcaagctattctcctgcctcagtctcctgagtagctgggattacaggcctgtgccaccaagcccagctaatttttgtacttttagtagagacggggtttcaccacgttggccaggctggtctcgaactcctgacctcaggtgatccacccgccttggcctcccaaagttctgggattacaggtatgaaccaccgcccctggccccatagttttaaaagcaatttcaacaataccaaaattatgtatcatttatttattctgtggacaaaatagtcgtgagatggctttcctcttttatgatagatgctttttgtcatccagggtcaggacttgcccaaggtatttttggtctcttgtttttatcagatggctcagtgccctgtatactttgcatcaaggaaagcttaattgatacatccactttggaaacgtggctttttgacaagaaagcctttttaatttctctttctttatataaggcttatccccagtaaaactccagcctagaaaaatcattgtgttactccattctcacactgctataaagaaatgcccgagactgggtaatttataaaggaaagaggtttaattgactcacagttctgcatggctggggaggcctcaggaaacttacagtcgtggcagaaggggaagcaggtactttcttcacaaagtgacaggagagagagagaatgagggaatgagaaagtgctatactttaaaaccatcagctcctgtgagaactcactcaccatcatcagaacagcataggggaaaccgtccccatgatccaatcacctccctcccttaacaggtggggattacaggtccctccctcaacacatggggattacagtttgagatgagatttgggtggggtcacagagctaaaccatatcaatcatcaagcaccaaattagaaaaggtttgagctgctctttttaggaacatcagaaaagttgctttttaggggatcacacacaggttcttcttctgggcatattttcaaagatctgacataatctaggcttaggtcttagatggacttgtaaagctcacagtggatagataaaacagactcttttgcaactggacaaagtggaaccccatagaccaatcattctgccaggtagagagaatataaagcagttcctcatagtttgcgatgaagagattattaatgaaatatcagtctccagagctgttttggagcaaatcctttgggactgtaagtgtgtgtgtgcaggtgtcaatgtcagaagggtgctgtaggattttaggttttgtggtaaacactggacttcacttaacaatgtgccattcagagatctaatatgtggttggaagtatgtgtaggatggtgtgtaaaataggtaattcgaaaggcagtgaatctggaaggggccaaaagaattgatcagaaaatgaactctttgtgactgaagttactcaaagttttgtcacattgaggcggcctaatgacaaatacttttttcttttgagggtctctggtcatcagaaacaatagttgtacttcattatccttcatgacagtttagacaacaaaaatgcaagctattaaatttgaaataatagacaaccctgttttatcattagtttagttctttttaaccttagtaatactcattttaatggcaaataaggctctttaggttactgccttagtttaacaggaaaattttcaatctggctaaagaactctagagttttagaactctaaaagcaagtttatctccctctgcccccagtaagctaagccttagggcctttctaaattatggtctagtccctagactctaagtaatgcaggactgcaactgtaatctgctttgaataaaaatacaacttataatgttgctttctttttaagtagaaatctgtaaacatacagtactctaataatttggagaaacttgatactcttgcagcaaggcagcttccaagtcatgggtttgcaaatccaagtccaatgccagagatatattttccaatttctgtggtcgcttttccacctctaagctcatatattctctccttttctatccttaacttgcataataataaatgtttgacaacttgctttctttcctcctctttcagtctctatggagtttccaacctgtgtgaacaatagaatatttcccttttaatacatggaaaagaggaaaaagaggaatgatgtatgtttcgagatatttaggctggtcaaactgttccaaggcatcaccacctgctgtttttaatcattaatgaggctgtcagttgctctaatctgggaggtgaaccaaaagaattgttttgactttaatttaatttaaaaatcagcttattgaaaaaaaatgcttccagcttctatgagtcaggttgcacactgttgataaaacaaagcaagtcaaatgttgatgctgaaccatcattcatatgcaaacgtgaaccgttttaaatttgcagaactcttattattaccatcactagccagaaattttagttctttttttgtttgtttgttttaaacagcgtctccctgtgtcgcccaggctggagtgcagtggcgcgatctcagctcactgcaacctccgcctcctgggttcaagagattctcttccctcagcctcccaagtagctgggactacaggcgcctgccaccacgcccggctaatttttttttgtatttttagtagagacggggtttcgctatgttggccaggctggtcttgacctcctgacctcgtgatctgcccacctcggcctcccaaagtgctggaattacaggcgtgagccaccgcgcccggccaaattttagttcttttaattcaagtagtcattgtattctggagacatgctgcgtgtaaatatctgttccattttttagaagaaaaactgatgcaccaaaattttaaacactctattaatgtcagaacacaaatctatagcaaagtccagagtgaagcctaaagtgcaaattcttttgcttgactcaatgctcatcacactgtttgtatgttttagaagtttagtgactatctgtgagtactctattaagttggagttttcttcactggatggttttgcttagtgacaaaatgagaactcagaaatacagtgtctgtgcacaagtggattttaacgacctagagccagacctttgtttgtgccaactgtcaatttggaaggtttcattatgcctctctcagcttcatcaaacactttcagatttataattgatgtcaactgaagttgaagtcaaagaaaaccttctttttttgactgtagaaaatatcaccttattgttgggccctggttagccggagggtaggtgtatcaaatcacactagccttctgctaaaacagcaagtgagcacttgctgaattcagctgataatcaatctgcagctaatgagtctgcagacagactgagcggctggagctggcaccaggaaaccaccattccaactaaccatctcttattaaccttttggtgtttcctttgtgacgctaattagagacccataaaactatctgctctagatcttccgtttaaaatacaattttcaaagaaacacaattcactttaaggctcctgttagtatggccttttcaaacctcatgaaggaaaatgactgacttgccatttaagtaaagtttggataattaatctgtaatgttttggtaattaaaatgccaggaaaagttggttctgtagttggtataatttataatactctccagattccggtggtactgaagtaggcggcagatgtttctaccaccgttatgttttgactgtctgaaagtacccattcccacgctgtagccctgtctgccagactgcctgtctgcctcctcctttggtgtgaatttgttttgattgcctgagggggttagatgtgtgctttgcttcctttctgggggatgatgagccaaggaatgagctttgtactcttgggagagggaaaagtcttcgaagttgacatgctgtttagctcaaaatgagttatcaaatgggcccactcaacgttcaaactgttacatttgcatgatgaagatggaggagcaccatgccttcctgctctagtcccccatctcatttcctctttaatattttttacacccagaacaagagcattatgagataagtgttctaagcgtgttggacccatgtattcatcctgtgctttcgtttacctgtctacagcaccttttagtgcctcatttctctcatttgtttaaaataaaaaattacctagcataaatgacttacatgatcctaggggacagaatctctagatgaggaattgactgactattaaataagtgagatctgcaaagctggacattgttttatttgatttagcaaagaggtactcttcgagaagcccaatattaatcatctaggatcctttagagattaaaatatccataccagaaatgcaggcacagaacccaatattcttgcagcattacctggagcccctttggtatcttaagttttcattgtcatcaatatggaatgttcaaagtcctaaaaagtccctgaaatcattgtgatatggaactcatgttataatatatcatttatcccttacagcaacactgaaagggagagacaagcatagaattccaaatagtcaacagaggaatgacagccatctatagtgaggatcaaaatcagaatcttggctgatggggaaaggttcagaaaattagaatgaggtgataagagagaatgaaataagataaaaatatctatggttgaaaccgagattggcagggacaaaaggggtataatccagatttccttttatatgtactatctagctaatactcattgataaacctaagaattctaattctcattggagtcttccagacagatagtgtccaatcacttcaggctccaactaatatgagccagtcctaatgaatcagtacaactatttccactctactccattatattcaagattgacatcattagtctgcctgtaaatacaaaggcaggcagaacatcatagtggctaagagtacagactttgaaataatacagatttaagtttcatgcttatctttgccacttaatagctattgaccttatttgttcgaatcctcaattttcacaactgcaaaatgggagtaatgatagaaattacctatcagaatgttgtgagaagatccagataaatacttcctggaatatagcaagtgtccaaaacatagcaagtgttattgtggggactgagtcagtggaatagccactttataggatttcaggtaccctaccactcaaagcccctcatctgtttgcttctatctctgatccctttaacagaaaatgaggcatttcattttacagttactgttcacactttaagcagtccatggggagagaaaatgcatttatttaaattcacactaagttgtaaatagttgctattagattgtttctaagcttattatttgagaggagtggtggggggaagaggatcgtttctagaatattgaactttaaaagtctcagaggggagaatcagaggggagaaatgcatagaaatggggtgacaacctcatgagtttgccagagctattggtgtccaaagaaagtaatttgatttactcactgtgaaatgtctggatgctggaaagctgcctttactatcaaatcatttttctgaatcagcccagactttgagaaattataacatgtctgccaaaggtttgaaaagaggttgtgttcatttacattgcaaaatatacatattcttgagcacttactgtgaggtaagagaagccctggttcctctctggaggcattgactccactttgccctccctgtatcaaaagctgcataccccagccccaggatccctgctgctcttccctgctctccctctcttgcttcacggttcttaaatggctaatgggtggtagacgtcattttgattcctttattttctctcccactgcatgcccagactttcattaaaaaataaatgaggggatgcatttttcatttttagtttattttctaaaaaagccacactgcaaagaatcccttctattctttttttctaacaatggactgaaaaatgctcagctcctacctgaaaggtcatatctccttgccatatgaatgagcttccagcaggtccatagggagagtgtcatctgagaaatgatgggaatttatgtgcctttggattttggcctcattttgtagtggaaaaataaatttgttaatgatagaaaaaaaatctcaaccaaagccctttataaaattctctctctataactcccaggagggagcctctcagacacacagttgataaatgaaaaaatattttttacccttgccttgcttagagctgtttctcttatattaatgtaagccaggtggcccaccttcgctgataatatggtgttgaatatagcaacctgcagttctattgcataaagtattttggcttgtaagggaccttgtgacatgtttgtgtttgtcaacatcctattggaaagtagggcttggggagacatgtacacacatagaactgtgtggaattagggatatgaaaaaaacaacttataacacagaggcaagcactgtgtttttgaaaaaggcagattcattgtgaaaataaactttcttttatagtttgaacattccatgaacaatgtaactggaagtgcatactttttgccttccccaaaatctaaatccacgtgctatatacaaaatgctaagatcattatagtcctggccgggcgcggtggctcacgcctgtaatcccagcactttgggaggccaaggcaggtggatcacaaggtcaggagttcaagaccagcctggccaacatggtgaaaccccatctctactaaaaatacaaaaattagctgggattggtggcgcatgcctgtaatcccagctacttgggaggctgaggcaggagaattgcttgaacccaggaggtggaggttgcagtgagccgagacctcgccactgcactccagcctggcaacagagtgagactccgtctcaaaaaaaaaaaaaaaaaaagatcattatagtccctaacatactttaatgccatgacctactgggaaatgagaattgtagttttcattctattgtttgttcattgtagagccttggataagtcactaacctctcaaagtctcaattcgtatatttacaggtgggatgatgagcaatgttgcattaatgttgataagaccaataatcaaagtgtctatctgtctatctatctatctatctatctatctatctatctatctatctagtattttttcttagtacaatataattgtgaatcggatggctaggtgttttgccggtttttggtttttgtttttgtttttttgttcccttctcttccttggcctgttgacctgacctgagaattgggaactttatgtgctcatcatattccacagattcatagcctataaacaagttacttgtccagtctggtctttggatttctcatctgcagaatggaggatactggtagtacctgccttgtggggtggttgtaaggattaaatgagatgacacatgtaaaacacttagtgcagtgtctgttccacagtaggcacttaaaaagagtagcggcaagatgatgctgatgaaacattctccctgggttcctgtctcccctcttcacttatctacgtctctttctctctttaaaattacaagcaaaatttaagtcccagaaagcagcctcttttgactaatggtttgtcctgatctctcctttacttggcgttctttaatatccatgtacagagtttatatcatgttaatttgcttttttcctgttttttaaaaatgtaaaatgagagagttgataattgttaagacatttcaacttctgagcttcttttattctgattttgggttctgggtacaaccttttcagattcctgagcacacagccatttgccaatggatctgtaatgagtgccacactcaaattaacagatggtgtggtgcgcttgctttgaggggtaattactctttcatcttaatttcctccctttggcattccttctttggatactgttcaatggcaatgccacgaagcataggatgaaaatcaaacaagtagcaggtcacttgtctatctcagacaaaattattgttaaaactaagaaccagtgaaggtctaccaagtgaggggcttgtaacttctagtattagggaccaagtaactcttaagggtacttaattgtctgatcgttcctcctttcctaaacaaggtggctatttctagttgataactgtctccatttttcttaaagtttaagtagattcctcctctatggccatcatgtcacacctctcacagttggtttgttcttaaactcttaacactgtaagccaaatctgatgtcctttcatcgttggagccagttgtaaactgctaactttactatataaactcctttcccctatcttcttcctcctctctcgtcacacacactttttcccctgatgcttcttatttagttctttctccaaccctccctgctttcacctcagcctaattctatccttttcccctctaggcaatttctcattcatcactgtgtttttacagagaatagaaataatttttaatgacattgagaattttttttttgggttttagtggttcagtcttcccttgtgaagatttttatggcttatttttatttggtaaagttaccttctttactattttttctctccttccacacaattcacagtatactaccatgagtgaggaaaaccctcagtgaataagcgctgatcaatttatttctctgaacattaccaaacaacagatgccatccaccaatgtttgatccccagggcagttcttatctaccttattttacagattccagaggtgaaatgatctattgtaaagcagtgcaaggatcagaagagagtttgtgtttcctggatatattatgtgacttcagggcattgttctgctttccatttgaaatctcaaaggctattggactgacaggaagttttcattcctgttatgaaagggttactgcctccagtttggaagagatgttgcttagggaaacagcagcagattatagcagtaaagccagaaagatcagggagtcagaagtattactatgagatggaaggaaatagctggtgtgcctaactagctcaggggcatgtttgatagtacccaggtatgtctacagaactggcacctgtatagatattgacctctcagtgtgtgttttactttttactctttgagttggactgctgtgttttctgtgtcactggtaattccattgaccaaaacacttcagttgaatcacagcttgagtcttcaagtttccttccctctaaccttgctggtttcttgctcatgttgatatttaagaacgttttctttcaattcagcaaagtttccggatacaagattaatttacacaaatcagtagttcttctataccacaacagcgaccaagttgagaatcaaatcaagaactcaaccccttttacaatagctgcaaaaatatatatatatatatatatatatatatatatacttaggaatatacctaaccaaggaggcaaaacacctctacgaggaaaactacaaaacactgctgaaagatatcatagacgcaaacaaatggaaatacatcccatgctcatgaatgagtagaatcaatattgtgaaaatgaccataatgccaaaagcaatctacaaattcaatgcaatccccatcaaaatactaccatcattctttgcaggattagaaaaaacaatactaaaattcatatgaaaccaaaaaagagcctgcgtagccaaagcaagactaagcaaaaacaaaacaaaacaaaacaaaaaacaaaaaaacaaatctggaggaatcacactacctgatttcaagctatactataaggccatagtcaccaaaacatcatggtactggtataaaaataggcacatagaccaatggaacagaatagagaacccagaaataaacccaaatacttaacagccaacttatcttcaacaaagcaaacaaaaacataaagttggggaaggacacccttttcaaaaaatggtgctgggataattggctagccacatgtaggagaattaaactggatcctcatctctcaccttatacaaaaatcaactcaaaatagatcaaggtcttaaatctaagacctgaaactataaaaattctagaagataacattggaaaaaccttctagacattggcttaggcaaggatttcattaccaagaacccaaaagcaaatgcaataaaaacaaagataggccaggcgcggtggctcacacctgtaatcccagcaatttgggaggccgaggcaggtggatcatgaggtcaggagatcgagaccatcctggctgacacggtgaaaccccgtctctactaaaaatacaaaaaattagccgggtgtggtggcgggcgcctgtagtcccagctactcaggaggctgaggcaggagaatggcgtgaacccgggaggcggagcttgcagtgagccgagatcgcgccactgtactccagcctgagcgacagagcgagactctgtctcagaaaaaaaaaaaaaaaaaaaaaaaagaataggtgggacttaattaaactaaagagcttttgcactgcaaaagaaacagtcagcagagtagacaggcaactcatagagtgggagaaaatcttcacaatgtatgcagactaatatccagaatctacaacgaactcaaacaaatcaatgagaaacaaacaaacaatcccatcaaaaaatgggctaaagacatgaacagataattctcaaaagaagatatacaaatggccaacaaacatatgaaaaaatgctcaacatcactaatgatcagggaaatgcaaatgaaaaccacaatgcggtaccaccttactcctgcaagaatggccataatcaaaaagtcaaaaaacagtagatgttagcatggatgcggtgaacaggtataacttccacactgctggtggaaatgtaaactagtacaaccactatggaaaacagtgtggaaattccttaaagatctaaaggtagaactaccatttgatccagcagtcccactactgggtagctatctagaggaaaagaagtcgtcatacgaaaaagatacttgcacacacatgtttatagcagcacagttcacaattgcaaaatcgtggaaccaacccaaatgcccatcaaagaagctgtggtatatttatatgatggaatactaccagtgataaaaaggaataaattaacggcatttgcagcaacctggatgagattagagactattattctaagtgaagtaactcaggaatggaaaaccaaacatcacatgttctcactgatatgtagaagctaagctatgaggacgcaaaggtgtaagaatgatacagtggactttggggacttggggggatgggtggaaggggggcgattgataaaagactacaaatagggtgcagtatatactgcttgggtgatgggtgcaccaaaatctcacaaatcaccactaaagaacttactcatgtaaccaataccacctgtaccccaatcacttatgggaaaaaaaaaggttaaaaaaaaaaaaaagaactttttctttcaaaaaaatgctgatgaaatgcaagtttttagcttctttttttcttgtcatttccactgatctgggctgttttagataggatgttttcaaaagttttatcatatggctctattctttttggcttattggactgcaagtgtgctaaggcccagtcattcaagattgattagttctttgtggtactatatgggcattttggtgattgtcatttctcaaaaatgatccaaaaacgattttccacattgtttaaacacactgttattactcttaacatcccaatagttattgaggtgtttattattgcctttttcttttaattggggtttttattgcataggaaaggggaaaagccctgattcaagcatttggattcaggtcctggaactgccactaactctgtgtgatctcaagcaacttgcttcctcgctttgggttccagtttttttcatctgtaaatgaagagtttggattggaatgacttataggtgcttattattgctaatactctattactgtttattgtatatttaatatggaaagattgtttggaaagtggatgacattttggctggattttcctgtgtatttctaaagaccagggcaaggtgggaaatctgactcttactcctggggctttgggctgtaataatccttccgttgtggcaagaggaatgagggtgagacattggtgaagttggcttttgttcaacattctgagcttattccttcttttaggcttttgtttgcatatgtttagcttaactctgctttcaagtgtgtgtattttcgtggaaatggtcctcttttccttttacaccaaattcatgttctcatcttccttctcccttactgaatcatccatttctgaatagttagcaattttcaacttaatgaggtctttcccctaagtgaagaacacagctgttcctcctctgatactttggcagctgcctctgcctttcccaaaatggaatgattagctctttcctttgattttttagctggccattagttcaggactactagcccatttcctgtgtgatggaactaccaaatcccatggccagaattgttccaatttgcctttagtgtcttttagtcttctggggacttaattcatatgaagtggaggatttatcaatctttcagaggtccatttgcctcattatctccagtgatttcattgttcagccttttgagatgctgatctacgaggagaacctagcctggtgtccctgatgtggttttgctggagaaatagcagataagaagatcctcaatgtattttgttcctgaatcaaatagccctcatttgtcacaggatctccacttcagtttctgaaaagcccttttgcctattccattttagtcttatgtacctgtatttaagaaagtgattactgtttttcctcatgtactttgacttcatctgcccctccagcctttaattttatgatttcacatcccttgttaattgttgggatttccttttatcatatgtgtcccttacacttaagatatcaagtcaacttctccactccactccaattcccctctcacattatgctccctgttaatcaatcaaaagcattgtgggtttagtagtgctgttccaaatgtgtgtggtgcagcccgtttttgcttccccaccccaaacgcctcattcaatttaattccatatacttagcatattaggcatcttgtcaatatttcctttctgaggtctatttttaaaatttgaatgcattctgcatgtgtaggtttttttttttcttaaatgatgagatctactgcaacagagagccagaattagctctgtgcctaggagaaaaggaaagcacagagggaaagaatatttctcacattctcagaaggtgtatgcaagagccagcccttggcacaattatttatacagtgccactatatctatctgcgtgcaccttcccctccatttgggagcataggcatccagtattctccttgggttttcttagtttctgtcaccattaacccttctactcagggccctgcattcccagtctttcctcgtttcctactttccccataaaaaacttacctggtccatgttccatttccccaaaatcctaattatttcaagggacctgttaaaatgacctgttctttctttccaaatagtatttgtatctcaatgtgatgataatccaaaagaatacctaatggtggcatttgggtcaccaatgcagcctgatggcgtgatgtcttcaggatatggccttttccccagcatcagttcctttatatcccaccaatagttggctacatggtcaaatgataaggctagcttggactccatttatcccagagaattagagctgcttgatgaataataatacctacctaacatatattaaattcttccttagtgcgaggcactgtgtagctcagcttccatgcatttcctcttttagtcattccaacaattccttatgaaggtcagtgctattagtcctgacttatggaagggaaaaaaggcacacagagtaactttaagtaacttctataggatagggctgttaagtcttagatctgggactctaaggtagtctcgctccagagcccatagtcttagactctgctgcactgcctctgggaaaaggatggtacctttttcacatgtacacctcactcagaagagctaacttcagatgtgctgctgggtagtaagcttccctttggcaaggaacaaatgaagtcttgagttgctccagtagatctagcttatatctcatcctttctggagagaagtttgcctttggacacaatgctacagcagaaaggtttgcctttgcttttctgcaccccaaaacttagcagtattaaaaactttcttcaccagtccctgtagttgtaagtcatcagtagggatatttgccaaatgcttaggaccaagcttacactctatcttttctctaccttcagagctgaaggagctatgtatgtgtgtgtgggaaggaggctctctttggtgttggtgagcatgaatatgacagactcggggtagggggatacatgaaggggagagcagactcatccacactctcaaggcaagtatggttagaaaccctgcttcactcaggtagcgctagtctcttcactgtaagtaggttttttttttttttttaaatatggtgatacaatgaattgttttctgaggtggatggttgtgttttctgttattactgcttttccttctggaccgaacttttattggctgctgcttacttactagtagaatgcttcacacctgtgggctgctgcagtcatgacaatgaacattctgttcagaaggggagcattcattctctttcccagcagctgttaccccaacattgggaatttaatgcattcatttgttctttagataaataggattaaattcagaatgaagcaaggagtagtcttagtctgtgctttgcatgattttcagggtctgtacagttccagctgtgtaaacatgattgcagaacttaagtatcgtctaatgggggaggatttcaatttaggagtggcacaccatagctgggctggagccagacattcttccacccacttcagtccacaccctgcggagtcggcttgctcagctcctagagtcagaagtgaagatggggcagctgtagttaattatactgtattatagcttcttatcagtaggggatgagaactaggcaagggctaggaaaatctaaaattatatcctcaaatatgctccagttatggcagtaggaaacaaagaaatggaagacattggacaaagtagggcagccccaaatattaaatatgacaagaaaaaatccaataaaatatctattgaaattgtagctacatttatattccaattgattcttttttgtggtcactgaaagcaagagtagagaaatattgtattgattgtaaaatattgatttgttctaatatttggactcagttttgttttcttgagatttgtttaaataatgaatagctaagtaatgctaaagacttctaataaaggagcactattattatggaaggaaatgcaatttcttcataacaaatacaaatattatggatcatccaattcctttgtccttgttcctccacccacaattatgtacagtgttggccctgctcagttcaatagagtcttagatccagtaattattctgtctctctaaagaggaacatgggcatacgtattcctgagccctaaaggatgggatttctgatgatatagcaggttttgtttgatgccatagattctccaggttattcttgggggagtatcattgatagctaacacaaaggtacttggcttcctactggatatgaatgtcaagacatggtcctgatcaaggaagacaacaaagcattgccttttgaatgtgctggggattgtaatgcatttaggaataacccaatcaatgatattcgttcctattacaactggctattgaaaaactatttttctgagaagctcacttcaaaatgtctctgagacagaatattcttttataggatggggagctctggattgaaaaagagaaatgctaggctgataaatcactgagtttgaatcatatggaaagtgttcaagaacagaaagagaggaaaattcaataaattactgttgatgcaatattggatggtcagggtgataagacactcactagagatttccagtctatgatgtacacacatgcattattttgtttactagttgtggtagcctgaagaggcagaaacatgcctccagaataccagcagggcataggggaacctctccatcatccatcatattcaactgtagtcggggggtgatcctgtcaatattgcctatgtggtatctctggaacttgggactgggatgcctattagtgcttcactgaattctgtatttgtagcatgtgcattgtagcatgtacataccatagcacttagctcgtggatgcttgtctgaatcattaggtatgaacattatgggtgccataatagcacaggaattactgcaactaaaaaggaaacacatggcttgtacttcatccacaatcacttacacttaagctattgatagttgattgggatatgtgaactgctgggcttgtgccatgggacttctaagcatatttggtgggcggaacagacaggaaggctgtagattttggcaagctgtggttcccattagtcaggctaactgtatctgacagtagagatcccaattcaccaagatgaagcttacttctctaggttttggctgatggcccaacaatattgacgtgaaggacaggagaggaccaatgttacgttaggctgtgagtttctaatgagcaaatagttgaatggtttagtgaataccctgttggttttttggtggggtaaacacaaaattcataatttgagagacatgtaagactcgaaattttcttttatagtacatgttaaccattcattctcctaatagggaaatgtgggctcttttatagggtgtgcatattatgtagttgtacagttaatactcttctctgtgtttttcttgtaaggggtgctgataacataccctactaaggaaattccaggcacagctgtttctaataataggtgccccaccccacagaattgtcaggcttactctcaaggttctttggtgggaaggaggattttctggcagagtcttggccactgccattgtctcagattgcctccctgtagcttccttggaggtatgagtttctaagcagaaagatttgctgtgatgagggaaggccacaaaactgaaggaagagagatgaggtcttatagaactaagtgagaggctgttttggtcatggcagagatgagttgaacactatggaatggagacaagatgagaagaggagtgggaatcaattcatgaaagcacttattatttataagttggaataaaaggttcattgaactccaggggacccttcttatatgaaatgcttgtgaatatgttgaaattttgtaacggcaattccatcttaaatacactgggggagctgacaacctgcagttcatggattattctatctagtgtacaatcactcttctattctaccctggacattcttccaggtgtggtcaagagaaagcggatagaacagatggaatatttcctctcaggagagttcaagagcttccttaaacaaaggcaagatgtgagcataaccttttactttctaaacaactttttctgagagctacctggaaaaatttctagcttcctcacagatccaagtaatttctgaaaatatttagagactagtaatcgtttaacttctaaaaatcaaagttggtttgtgctaaaaatatcatccggacagtctgtgtctagttgagtggggaagaaaaaaaggcaagctcttggtatcaatctttattccctctgtaaacacacatgaccagaagagaaggctgttattaatggtaatgcagaccagaaaaaagggtattattttcagtctgttgaacagtacaaaaatgcttctcaagcactgtgttcagatgtttctttttattagccatcacacaaggaattagactcatttcaaacagttcgtttccctactcttgtctccgtaaaatcgttactcatgagtggtttctttgttgaaatactgctgacctcccatattggaatgcacaacagggtgttaaaaatataaactttttagtttgcataaactctggaagaagggggacaaagattccccaggagaataaaaccattcgccaatgtccttgtttattagtgtcctataagcatcttattcaggaagctatgtcagcattacaattctgtatagactttgtgtgtgtgtgtgtgtgtgtgtgtgtgtgtgtgtgtgtgtgtgtgtgtgattaacagcagagggctctttgaattccagcaggaggttttaaaatataattctgcatctgcccctctttcttgtcctttccaacccttttctacctcccttctcatcaccgacccatccagggccattaggatagataaaggagttgtgccatgtcttaatatatgagcaaatgatgatccttagctctacagctaggcgctgtttgcattttgccaaaggtgattattttatctgcagttttaatagcaaaccagattatttgctgttcactaactaataaaagcaaataaaaacagattgcaaagtggaattaaggggataagaaagtactagagccaaagaaggctttttctttaattaataatttccatttactcttagaatatttttatgctagagttcaacatcttatattaaacatgtgtgcacccttcctcttataactgccgaattggaatctcagaatggaaatcatgcaggcttgaacggagcttcaaattctcccagtgttgtcttattgtctgtacacagaactagactcctcagggcttcccccaccacagcatggcattcctccattagccccatgtttcccagacccagtcatgaagaactggcattttaaccaacaagtagaaaacacaataaaattggagttcaggagatgcaatgttttggagaaacagattattccaagagtgtaaagatacatgatctaaagatggacagaacatttaaatttaccagcctggttttcagtgattttttgatttgttcaattaatttgtgaatgaaaatgcatcttaaggatggtgaggactggtggtagtggtggtgaatgtgcgtgtgtgtgtgtgtgattttgtggccatgatccaggcttactatgcatcagctcctaaagagatttttacagagctgtgtctgagtgtcttaattcaggtcatctcaaccagagagccttctgctactcctacgtgcaaaggctcgagttaactcagaaaaagttctcacagctgtggcccagatagattccaagacttctctgaaacttcagatggaagagcctttctctttaatagagagccattctctctattaaagaagagttgggcaagctggaggccagaggattatattgtaatcttcatgtgctgaaaggtgtaaagaatcttttcttcttaataagagcactgggacaagcatagggtgccttcaaattatcagacttcctcaaacaatagatcaattagcctttcttctgaatttgtgtaattgtttttgaggcaacaccctgaaaaaatatagcttactttttccgactagtataattaagcggacaaatggaaaaagaatcattcaaagtaaattttaaagaaaagagcaaaagagtaaaatttagcattgtccatgtaagatggataatgacaagtaaacacagaaggtggtgtttgatcccttcgattttggtattcattattcatagttattattcataaattccaggttaggcttgtgccccagtgacacatttgcattttactttaagttgatttctacctggttttgcaaacaaggatttaatgatttgggctgcctctcactcttcctctgttgcttgtcttttcatatacagtgctggcttctagccccttttacaccctttgtctccatcatcagtcttgctctcccatccaatgttttactctcactctctttctctcttctctcttctctctctctctctctcaatgttttaggaaaaaagatttctaacgtggaaaactgatatttgaatagagtcccctaaggctatcaatttacttttaatttgtctggagctaagcttttctttgttgcaatgaggaaggattaaaactgctgtaaaatttattagcttccagaaagatatttgaaatgcatttttttaatgattgtgctgtttgctgtacccagaagcagtgtcatcacaactatagtattccagatggttcccgaagttacactgaaacatcaagataatgctagacttttttatgacgcctctattggtaatgaatagtccatcccaggtagctaatatatattaattaatatatatttgtttccaatgaccatttctagtgatacccagctgatgacaaaacacacacactatccctttgaatcattacaggagacagtgattggtttactgagctctttattttccaaatgtggaagaaatgattggagatttactaatgctgtttcttagcttccccacccagtcctaggaacatattggtagtcaagaacctttaaggaatttagaagttacagttgcaacatttttcatggactcatgtatagtatggcctattctacaaaactgaatgtcctgggacttgactgaaggaagtgtcagttcctgttaaggggaacaccagctgctgggtgccctttttgttccattcaacagtaagttttcattagaaaagggaagatttttctcttggccaacgtgctctgtctactcttgctttctgtgtcagtcttatgtgtgccatcttcactatgtattctcctagaagctcatgaccatcatgaaagtggcttcttcacaagctgatgatctgctagcagtttccttattttccacaaaagagtgaaaccaagttggagataagtttaggttcagaactattttttaagtgtgataggctctgtgactgggcgcggtagctctctcctgtaaaccctgctactcctgaggctgaagtgggaggatcctttgagtccaggattttgagaccagcctgagcaacatagtgagattctgcctctaatttttttttttttttaattagccaggcacctgcctgcagtcccagctacttggaagaccgagccaggagaattcttggagtccaggagttggaagctgcaatgagctatgattgcactattgcactccagcttgggcaagagtgagatcttgtctctaaagaagtttttttttaatttttttattatttatttatcatttttttgtaaaggctctgtcatcctagatgtataactgcatgtagaatgcatctgacttttaaatctacaccaagtcaaataactgatttgaactcttcagagaagtgacaagatgttgtaggtatcccactaatataggtttgagggacttaattctgtgggcgtctttatatgaaactttcaaaaacggtcctatgtttttcagagttgtagtatctcagtgttctatcttttggggaatagctcattggccttctgtgtcacctcatatttactagtaaagttgctttttcaaatggtttataagcacctagatgaagtccagcactttgtcagattattttctccatcacagaagccaaaatacaaagatttcagtctagtcaatctctgcttatctcagtcactgtcagcacctcttatttcttagtctcaattttccaggcagccttttgcttgatttccttgctccccatgcatcagcacaaatgatttatacttatgtacatcttgaaatctcttctttatggattgaattgaatcgagccccagtacaaaaatgaaaactccaggaactgttgtgattgcccaaattacaacttggattgtatgactgtacacgccacactctcatctatcataaatattaaattctcaagcacttatacttcaatatgttttaactttgtctgtttgaccagctcagcactaaagattccattgaagataattcaattgctttgaattctgaaaggggcatctttttaatctattttcatgttgcactgggagttaagtgaatttcaggtgcatagcctgtgaatgatgggagaggcctatgtgccatttggcatcacagaggccaaatattgggtgacatttgctaactaatgctgatcagtgaaatggtctaggacaagattggggttcatcagtcttttcagccattctccctatctcaaactaaaactaaactttgcagaatttctgctgttttgtcagccatactgaaaatgccaagttatgctaaccagggctggccttttttcttctgtcttgtcttttggcaacatccctttgccagtctcaggaactttgttcccacaccccatccccatccttcatccttcctgaggcatctccacatccagacatttctagtgtttttaaccccatcaaatctctcttatcctggatacccttattcagggctctgttatgtgacccaaaaaaatctgataatctcagttcgataatggtgcctcttctaaacatttttttaaatttattttttattttaatagtttttgtggaacaaatggtgtttggttccatgaataagttctttagtggtgatttctgagattttggtgcacccatcacccaagatgtgtacactctacccaatgtgcagtcttttatctctcacactcctcccaccctttcccctgagtctccaaagtccattgtattattcttatgcctttgcatcctcatagcttagctcccacttattagcgagaacacataatgtttggttttccattcctgagttgcttcacttaaaataatagtctccaattctatccaggttgctgcatatgccattattttgttcctttttatggctgagtactatttccatggtgtgtgtgtgtgtgtgtgtgtgtgtgcatgcatcacattttctgtatcctctcattgattgatgggcatttgggctggttccatatttttgcaattgcaaattgtgctgctataaacatgagtatacaagtgccttttccatataaggacttcttttagatacctagtagtgggattgctggatcaaatagatacacttttagttatttaaggaatgtccacactgttttccatagtggttgtactagtttacatactcaccaacagtgtaaaagtattcccttttcaccacatccatgccaacatttattatttttttattatggccattcttgcaggagtaaggtggtatgacattgtggttttgatttgcatttccctgataattagtgatgttgagcattttttcatatgcttgttggccatttgtacatcttcttttgagaattgtctattcatgtccttagcccactttttgatgggattgttggttttcttcttgctgatttgtctgagttccttgtagattctggatattagtcctttgtcaaatgtatagattgtgaagattttctccctctctgtgggttgtctgtttattctgctgattatttcttttgctgtgcagaagctttaattaagtcccatctatttatgtttgtttttgctgtgtttgcttttgggttcttggtcatgaagtctttgcctaagccaatgtctgtaagagtttttccgatgttacctttagaatttttatggtttcaggtcttagaattaagtccttgatgcaccttgagttgatttttgtataagatgagagatgaagatccagtttcattcttctaagtgtgacttgtcaatgatcccagcaccatttgttgaatagagtgtctttcccccactttgtttttgtttgctttgttgaagatcagttggctgtatttacctttattcctgggttctctattctgttccattggcctacgtacttatttttataccagtatcatgctgttttggtgactatgcccttatagtatagttctagtcgggtaatctgaagtttccagatttgttcttttgtttagtcttgtttttgctatgtgggctcttttttggttccatatgaattttaggattgttttttctagttctgtgaagaataatggtggtgttttgatgggaattgcattgaacttgtagattgcttttggctgtatggtcgttttcacaatattgattctacccctccatgagcatgggatatggttccattggtttgtgtcatctataatttttttcagcagtgttttatagttttctttgtaggggttctttcacctctttgcttaagtatattccttattattattattttgcatctgttgtaaaagaggttgagttcttgttgattctcagtgtggttgctgttggtgtatagctgtgctactgatttgtgtacatttgattttgtatcctgaaactttgctgaattcatttaccagatctaggagctttttggatgactcgttagggttttctagatatacgatcatatcatcagcaaacagtgacagtttgacttcctctttaccaatttagatgccctttatttctttctcttgttggattgctttggctaggaattccagtaatttgttgaatagaagtggtgaaagtgggcatccttgttttgtttcagttctcagggggaatgctttcaacttttcgccattcagtataatgttggctgtgggtttgacatagacagctcttgttaccttgaggtatgtcccttctgtgctgattttgctgagggttttaatcataaagggatactggattttgtcaaatgctttgtctgaatccattgagatgatcatgtgatttttgttttaaattttgtgtgatgtgtcacatttattgacttgcatatgttaaaccatccctgcatgcctggtatgaaacccacttgatcatggtggatgatctttttgatatgctgttggattcggtcggctagtattttgttgaggatttctgtatctgtgttcatcagggatattggtctgtagctttctttttttgttatgtccttccctggttttggtattaggatgacactggcttcatagaatgatttagggaggattccctctttctctgttctgtggaatagtgttaataggattggtaccaattcttctttgaatatctgatgaaattcagctatgaatctgtctgactcttgttgacaattgttttattaccatttcaatctcactgctcattattggtctgttacgagtttctatatcttcctggtttaatctaggggagttgtatatttccaggaatttatccatttcctctaggttttctagtttatgcacataaaggtgttcatagtagccttgaataatcttctgtttctctgtggtatcagtagtaatatatcccgttttgtttctgattgagcttatttggatcttctctcttcttttcttggttaatcttggttaatcatttttattcatttttttcaaagaaccaggtttttgtttcatttatcttttgtattatttcttttgtttcaatttcatttagttctgctctgatcttggttatttcttttcttgtgctgggtttgcatttggattgttcttgtttctccagtttaatgaggtgtgaccttagattgtctatttttgccttttcagactttttaatgtaggcatttaatgctatgaactttcctcttagcaccgcttttgctgtatcccagaggtttggataggttgtgtcactattatcattcagttcaaagaatttttcagtttccatcttggtttcattgttgacccaatgataattcagaagcaggttatttaacttccatgtatttgcatggttttgaaggctccttttagagttgatttccagtttttccactgtggtctgagagtacttgatatcatttcgattttcttaaatttactgagacttgttttgtggcctatcatatggtctgtcttggagaatgttccatgtgctggtgaatagaatgtatgttctgcagttgttgggtataatgttctgtaaatacctgttaagtccatttgctgtaggttatagtttaagtccattgtttctttgttggctttctgtcttgatgacctgtctagtgctgtcagtggactattaaagtcccccactattattgtgttgccatctatcttatttcttaggtctagtagtaattattttataaatttgggagctccagcattaagtgcatatatatttaggattgtgatattttcctattggactagtccttttatcgttatgtaatgtccttttttgtctttttaaactgctgttgctttaaaatttgtctgatgtaagaatagctattcctgctcgcttttggtgtccatttgcatggaatatctttttctaacccctttaccttaagtttatgtgagttcctatgtgttagttgagtctcctgaagacagcagaaacgtggttggtgaactcttattcattctgccattctgtatcttttaagtggagcatttaggccatttacattcaacattagtattgagatgtgaggtgctattctattcactgtgcaaattattgcctgaatacctttttttcattgtgttactgttgtatagttcctgtgagatttatgctttaaggaggttctattttcatgtatttcaaggacttgtttcaagatttagagctctttttagcagttcatatagtgctgtcttggtagtggcgaattctgtcagcatttgtctggaaaagactgtatctttccttcatttattaagcttagtttcactggatacaaaattcttggctgataattgtttcatttaaggaggctaaaaataggaccccaatcccttctagcttgtagggtttctgctgagaaatctgctattattctgataggttttcctttgtaggttacttgatgcttttgactgacagctcttaagattcttttcttcgtcttgatttcagataacctgatgactatgtgcctaggtgatgatctttttgcaatgaatttcccaggtgttctttgagctccttgtatttggatgtctagatctctagcaaggctggggaagttttcctcgattattccctcagatgtgttttccaaccttttagatttctcttcttccttgggaacacccattattctttggtttggatgcttaacatagtcccaaacttcttggaggttttgttcattttttaaaattctttttctttttctttgacagattgggttaattcaaaaatccttgtctttgagctctgaagttctttcttcttttgttcaattctattgctgagactttccagtgcattttgcatttctctaagtgtgtccttgatttccagaagttgtgattgttttttgtttatgctatctatttccctgaagacttttcctttcatatcttgtgtcatggttttgatttctttaagttggacttcacctttttctggagccgctttgattagcttagtaattgaccttctgaattttttttctggcaattcagaaatttctccttggtttggatccattgctagtgagctagtgtaatcttttgggggtgttaaagaaccttgttttgttatattaccagaatactttttctgcttccttctcatttgtgtagactgtgtcagagagaagatctaggactcaagggctgctgttcatattcttttgtcccatggggtgctcccttgatgtggtgttcttccccttcccctggggatggggattcctgagagccgaactgcagtgattgttatttctcttctgggtgtagccacccagtggagctactgggctatgggctggtactggggagtgtctgcaaagagtcctgtgacatgatctgtcttcaggtctttcagccgtggatatcggcacctgctccagtggagttagcaggagagtgaagtggactctgtgagggtccttggctgtatttttgtttagtgcactggctttgtgttggttggcctccagccaggaggtggtgctttcaagagtgtatcagctgcagtactatagggtggatgctggatcatcttattttaacaggcattttttaatgcatgtatccagatgaatgaaaaatgtggaaatttttctccatgctgcaagggctggttcttggatagcacttctttggcatctgtcaggtaacaccacataggtgttttgaatgccaatcagtgctggcatcctttcccttctgcctgatgtctgtctgtcattccatagtgttgtaggggagggctgctaacaaggacgaggctagggaacgggagaacaaaaagaaagttttagggagcaaccaaaagtggagaaaattgctgaaaaaaagggaagaagggagtgagaaagagacaagtagttgtttgtagtgtaatttgtgatgtgcttcttgtcacatagagtgactacaggatagcttggtatcattggttcatgagtgtctacagatatctcagccttcactggtgttcccttgaatgttttacggatggaattccatcttttttttgctaaaattttactttagaatacgactgtaaaccccctgcaacattacagcctgggagggctctaggaagttgtcattacgctcatattgaatttttgctagatacataacagatattttccatatgatatctaaacacccaaataagcccaatcctcaagatatcaaacatatcaaaaccaaaataaaatgcctaaagccttggtaatattttccttccttccttccttccttttttccttccttcctttcttccttccttccttcttccatttccttcctttcttttccattgatcccgttgctgctttacttgccttgttaagttacagagatgggattgataatagtgcaggagagagcactattaactattgttagtatagaaaacttgcaggtctatggcaaatgtattttcaacgggatgttagagggtactagatctctctaacacctgtatatagtgtgcaggaaaccacacagaggctaagaggacacttaatgtttctcaagttctaaatttactttacgcctctgacaaagctacatagtttactttgtaggtttctgtagtatttatgataaaatagttatttccactttaggagttgcacagtatctggggtgggacagtatctggggcgttgaccaatattcttccttctttctgtgcatttttcattcaattaaattaaactattattaacagtttaattgacagctctgtgctggacgctttgctaggttgagatagatgtaatctttgctcatccagagcttaaaaggtagcagaaaatatagacatgaaacaagtacagttgtctcttggcatccatggaggattggttccaggactcctgagaatacgaaaatctgtacatgctcaagtcctgcagtttgccctggggaatctggtggaacctgtggataaatgaaaaggtgaccctacaaatctgagggttttgcatcccacagatgttgtattttctattcacattttgtggcagatgcagaacctgcagatacagagggctgaccatatttatttttaaaaacctacatgtaagtggacccatgcagtttcaaacccatgttgttcaagggtcaatggtaattacgcgtgtgatgaatgttataaaagggaagtgctgtgagatctaccttagtctaaaggatcacagaaggactccctggggaagtgaaatttaaatggagacttcagggataatgtattaatcatgaattgtgtttaaccgctagtaataaagatgcccctctcctactaaagaaaataaatcaatgacttaaataagagatatttatttttcttcttattaaagaagttcaagtttggtgagggtagctctacagtatctttaataacccaaggtccttatatctttctattctgccacccacaggcacatggcttctatcttcagggttgcctcatggtagtcagacagatgttgcagcatcagtcattatgtctccattccagacaggacaaagcaggaaggaataaagacaaaatagtctcttacctaagtcagctctccccttttaaggaattttcttaacatcttgctttataatgttggtccaatcttatgttacatgtctgcaagggagcctgtgaaatgtagtttcttttagctgagcacactgccattcctaacagaaatggggctttgtttctatttaacaaaaacagataaagatatttggcaggcaattagttatctctgcttcatagagtaggagttagataggtcaagggtgggtggtgtacttctcaacaattaggtttcctcgattaggcacatgtgaccaattttaacagcactaaacttcttcataatcattgtcataatctcctccattatatctcacaaaaaatggccctgctttggttacagattgtcttgttcatgaggtgatgcagaataaactaagtagatgtataagagtacaattcaggaagcttgtctgatatacacatcacttgcttgttggttctactactgctgccacttagaagtagccaactacttgagctctcaggaactggaactcactttaacttttttctttctgattcattgattgcagattatttctgaagaggaaacatattgctcttgtaactgtaaccttgaactattttagtgctggattttcgtctgtgatcattaggatctttgagttaatacacccaaactctgaatcacagtaaagaactgccagcattatcaaacacatccattgtgactggatatctatacaaacccagcagagcctcttagctcttctattccaccaggacttggaaagttttagcaaagcctgaaatgatgttttcatcattttcttttattactttggtggggaccatgggtaggctctttctagtgtggaagtacattgtttggccacatctgaggagatggcagtttcatgtcctgaggagagtagtaattgctgcataaagttttgctattatctgcacaaaatagcatattctggtctttttctgtttgaattacttccttaatctatcatgacttagtcattactgccttactgcctcttttgcctcttgtaccctcgcaagactgatgctttaattttttttttttttttggccaggggttttggaattctctcaccaagtttcctgatgacaaattgtgaccaccaaatacttactgctatgtagattgaagaaactttcacttttttctgtattttttatggtctaaaataatcagatttgttttgaactaaggagttctctggtctcaagatttgtgttcctcttccaaatttatgcactctgttcttgtttcttttgcaaatcctagggacaacttcagaagcagggaaaaccaatttacaaattcatcagtcaaccctcatcatgagtatgtttaaattaaagacacctgccttcattcatctatacgtgaatttccacaactatatgtggattttagaatgccacattttgctttgcctaggttcaggtcagaactttcagataaaaatgtagcaaagtatcaggtcacagataggttcataagaagaatctcagcaggaacttagtgaatcgtgagcccatctctctatataagctggagccagcaccttgacagtttgtgatgctacaaaatggttcttctctagtctcatagctccattcccagccactatactacatgaggactggcacataatctttacaagtcctatacaattacagaagtagtctttttaatttttatttttttacatctggtctgtcttcattgctatttttaaggggctttgtattgtgactttctcacatttactacacaatttctttactaaactgaaattttgatttttgaaaggtaattcatctgcagtatatttatgaatgtaaattaccctgtgctgggcagagatgttcttcctgcctgtctatattgacaatttttatttcatatataaagtggctataaacatatttaagctaagttagacttcattgtaactgtatagacaaaaatgtcacaaaatatctgaaacacaaaaataagaaacagtaactcagtgcccttggtaaggacttaaaaaaaatataggtatcagatccaagccaaggatgagacactgtgagtaaaagagtctcttagattcaagtcttcacttgcgtgaggaagggcagtgcatataataagtttacataagtaatctgagaaaactgcatatgattccagctcatatggagctgaggtaggctcagtgagcttggtggggaggcttagactgattgcattgttgggtgtgtcctgagttagtctccgtttctcttttcccaacagtgattgtttcatttagacagtgggtcagctgaaggcaagtactatctatacagagaaacctcagagaagattgaattccctgctctggtcttccaagatttataagatcttggaggtgtctgtctctgggctctctattctccctccccagatattctggggatccaagtctcctcatgctgttcatttgaggcagcctagtatagggaaggagcattgtacttggattcagggtgacacatgggtggtattctcctattgaatgctgttgaaaaaaactaaatctcaaaattagaggacagtcacttcatattaaaaaactcaaagaaataagagcttcgtgttgaagacattgggcagatggtactcaattgtacttcactactgctctgctctagaagtgtgagcaagtggcctgaaatatcagtcttaatcttggctgggattttcttttcttagttggtcatatgtccatggtttcagggctcaagggttaggtctttatgcttttatgcctttcaggtagggacaaaaagggcagagatcttatagccttctggacatttttttgctggcttccagggatttttactctgatttgtagaaatggaaataatttattgaacttttcccccacctgcaactgcttactctctctaccctgaaacactctcactaattttttagaggtattatttggaaagttaccagataggccttggaagagatgaagaggcaaaaacagcttattgggaagccctaaagatgtgacttctgttctactgaagggatcttgggacctcctgtggaaagcactatatttggaggaaactgattaaaagtagatcaactaactcttccactcatactgtttagtctacacaaagtgcttctcaagtatatcccaaaatgcttcccttactttcatattttctgcctcccaggtacatgcatgttgaatgataacagggtatcagatggcaacacagagagtttgcagggaaggggcggagaaagggccttgacagacctttcattttgcagaagtggccatgcagcctgatgtggaactgagctggagtttgcagaaacattgtcctaactaggtggaaggcactttccctgttcatgatgttgttcatttgttatttggttccactgtacaaaattctgagtgtttcattgcccagcactgaaagggggatgaaagtgtccatcttaaagataaattggcaaattatgtcaaggtacactgaagaggtcttgtctttagtttgcttttaagtagcttaaatgaggtcaagggccatgcccagaattgtgttgaaatctggatttagcttggattaggtccttgatatttaacaggcttctaatgtctttcctccaaataatgaagtgtacagccaattcaaccattattccttgagccctctgccttgtgccccttcaccaaagaacctttgatgaatgaggcatagcagtaccttgctttgctatgccatttactctttaaaaacaatgaagaagcaaacaaaaaacaccaaaaatatagaaatacaagtatacaaggaagatgtgttatatatagactgatgccaagtaagactctgaattgcagacatcttccccctgcaaaataagtcacaacataaatatatatattttatatacatatgtatatataagatatatatatgtattttctgtaaatgttaagctgctcatattttgatgcattgcgcaatgttttcattaggtcatcctcttgtaagaatgtaacataaatataaatagatctggaaaactagggctataaaacaaacattgagattaacagttttccagtaacaggcagaagttaaccctgggtccatgccttggtaaagcctgtgcagtaagcctctctgagagccagattgaagctttaacccttagtgaacctgacctggaaagataaatctatgtctgcccaataattatgaattgtaactgctgagatcttccaggatggagttaaaataatccatgaaagatttctttaagaaatatttctctaacaaaactgcagataagaaagataaggagggatggctagttgggtctaattaacaatgaccaacatgtcactgatgtttgcgtagggccaattgaagcttatgggtcagctggatagaagggctctcagtttattccttctgatgggaaatcaagtcatggaagtggcatagtgaggagattggctggtgggactggtggtcaaaaagaaggggtgtgattgggctttcacagagagtaggatatcaatctaaaattaaattaagcactgtgtatcagtgatgggtagggtggaagggtgtttggcagtgctgttgttcaaaaatatggccaaggcttcttaaatacactgactgttggattcccttccctgcctccactccctcatctgctgaatccagtttcaaacacaggtgatttttagcaggagttgttgattaaaatgctgactctcagcaccttgacactccagatgaactttagaatatatatgtattttcatcataacgtgtttccctttaggttttttgttttgtcagtagtgggaaccttaaaaaggatatacatagagggagatcttcagccttttaaaaaaatccagttcttcacacttgtcccaaaaggcaataaaggactacctaaaagtgccatttcccacaagggcctgtggatatctaagaaaccagaacactggggagtaacagtgaatcctgggaaaagctgatgaaattgatattttcttttttccaaacagatcagaatgaaggatttcattgccgggaagaatgccggattcttggccactctgacaggtgctggatgccccggaaccccatgcccatccgttccaagtcccctgagcatgtgaggaacatcatcgcgctgtctattgaagctactgctgctgatgtcgaggcttatgacgactgcggccccaccaaacggactttcgcaacctttgggaaagatgtcagcgaccacccggctgaggagaggcctaccctgaaaggcaagaggactgtcgatgtgaccatctgcagccccaaggtcaacagcgttatccgggaggcaggcaatggctgtgaggcgattagccctgtcacctcccccctccacctcaagagctctctgcccaccaagccttccgtgtcttacaccattgccctggctcccccagcccgtgatctggagcagtatgtcaacaatgtcaacaatggccctactcgtccctctgaagctgagccccgtggagctgatagcgagaaagtcatgcatgaggtcagccccattctgaaggaaggtcgcaacaaagagtcccctggtgtgaagcgtctgaaggatatcgttctctaaaccagtctccaggaagaagagaaagaaaccacactggctagtgaagaagcaggagcttcttgttttaattgctcaccaatggttggttcttgagtggctatatttcagagcttttcctaaatgtattgtttataggtgattatcattctgtgacagtcccttgtttcaacaggcagcaggggtgttcagttggagcaaattagctttggcttgagttgttcatggggccttgatgttggggaaacagagacaaattcagttgtgaaaagtattatgtattaagtgtttgaatttatatatttttctatgtcaaaattataatataaattaccattgtttgtggaggattacatttaaaaaagcaaaaagtgaaaaaaaaaagctctggacacctttaataagctcgccactgttttttgtagtgtagacaagttaatggtcatttattgtgtactattcattgattcagtgatgtgaaattgagcccccaaaaggttgtttctgaagctcgagtacttcccaatgccgctactttgctgtggacacccctgctttaaaaacccttttgctagctgtgctattgttgtatttgatattgcaaattgctatgtgtgtggtgatggcaaaaggcttttaaaagttggtgttttctttttcttaaaaaaataataaaactacagacaaaaacaaagtgcaaacaactgagacagcaaatgaatgagcaacaccatgcatatagattgagtacttggagaatactcacgttttttaactcatgtagtgattgctcaccactttgcaaagtatttttcctgcctttcagtggtctgcccaggtccatgatagatcattgcagaaagtcatttttggataggctgctatctaatttgcagttgtcagaaatactgtgctgaaagttttatgacatccatcttttaaattttcaggccctgaacaggaaagttgctcctgaagttatgtttccaggcttagaaattccctctctccaatcatctaaaattgaagatgactgaatctattttaagatctaaattagcatctcttcagacacacacttcctgattcagtgtttcccaatcatgattagaattagactgcaaagcacgtcatgggctgggattgagaactccatgttgctctgtatcttaggcttatatacgtagggatagagtaagcagtacaaagtgtatattttggaaaagacaggtaacaggtaacagcatcgctaatccaattactgtgccttctaaacggagacactcagacacttgaactcatctttttatgactaatagttttttgattaaaaatgtgaacaagaaaatactaaaataaaaatcctttcgatttagccaactctttttgctgtaggctaggaatacaccctttttaaattaacacactgtagatcctttttttctgttttaacattcctctaactcccccatttatcttttgtctattaatattcactagccaacatagtatttttgcagcctaagagttcattatttaaaaataaactaaagaaatatgtcacctttgttctgccttggtcttaagagagttgtttctagagaaacaagttttatggttctgttttcatttgtttcattttttgaaattcaggaatacacagagagaaggcctagaggttagagcactagaatgcaaaagaggatttattttcttaagtttaggtagataagtcagctcttttgaatgttttacttatttttgcctgagttcctagctttacgcattactaggaatattttcttttacaggagggagaagggttttgagggagggggtgggtaaggcagtagggatggggttaggtaggggagaacatttctgaaaaagaacttataatgaagctacaaatccatccttatttcttattcagtgctgaatactacctcatgcaaaatattggtgtggctgcaaatttccctctgaagctgacacaattaaggatgaattaccataacatcttcatttttcctcatttcattgcctctcatacagttttctccctctgatttatttcattttggtagtggattttgaattaagtatttatttctctttgcaagtgactatttgattaacacattaaaaattttttaaaaatttcccctttaagttatgatggctgcctatagaatttagactgtttctcaccctgatccatcctgatattatgttattagctacgatttcaaggtcactttgaagtcagacttcacagttttctacaggtgtatttcttgctatgctcagtgggaaccagggagcagaaaagattgtggaaagtgggaacattaattgtcacgtggctgttgagccagagaggccactggctgccatgcctcttaccagccaagttttaaatggttagagtggcattggcattgattttgcttttctcttgggttttcttcatttcttttcataattcatcttcaagctatagatccatccttcttccctatccaaatactttgttctcagtgggcagtcagatttttttggcttccaaacctcactgagcatgttcagagaattcctctcattaaggaaatatttttccccacaattgtctgatgtatgagtcctctcagaagcacaagtgcatactaggaaggctttgtaaactggttttgtaggcaggctgtacctgcaaataggcattctgagcaaggatcctaaatttccctttggctcatgtcccccccgccccaccccaccttctcctttttggcatgtctggtgaaaagctacaaggttcacagggccaaatattctcccttttgttctctaaacatgttgcacacataaactcaagggagtgatttcggttcctaagtcctagggagttctattccatttattctgatgtcccttttaaggaggagttggtgttgaagtgtgacatgctttaatgataactgctttggcaattccccagacaggtatacttcttcatccaaaattgcacctaaggtgttcatttagacaaaattgttcgcttagtgatccactgatctctaatcagaaatatttttaaaaaatacaatttagatctctgaaaattggaaccactcaagagtatcatcttgatagtgttacttcagcatatgactgactgattttatgaagggagtttagctgacttttccctgtagccctatcatattaaaaacaaaaagtggtccacttgaagcagcaaggacaaagggcagtttagggagaggcagggtgaaggggatagctcgattgggcatccagagtggaaaaggattattattgtacataatagcagttctggctggaattccaatccactttctggggatcattttgatgttgaatgttcccccaaagcattctgacaagtttggtccacttggctctttaccccgggtaataagacccttattgactttgaaaaactggcataaatgagcttaagaaatccattgtatacagtcctagtgtttgccttcttggtaaaattacatttaaggatgtcatttcatgagtcaaattgtatctgctgacactgaagtgtattgagatgttgttctttagtttaagtatgtaacaaagtaatattcaaaggggatgtttgggggtggggctgggaccgggtggctttatattgataatgaaatattccagagcaaaacacattgtcctaatgaagttgttgcagctctcttcgttttcttgtgccgctggaattggcttgtgggtcacttgttgtgcaaaagtgaattaatttcaaataggaatcatattgcttttgtgaaacaaagaaaatttaccaccttgtctgatacatagattggaaggcgctcttggtaaagaataacccacaaacacctgatcttgattggaaagcattgtaggtcattagggaaaactgatgatgctgactgttgctccagctgtgttggcaattcaagatgaccttgttactaactgaaagttgctgtcaaccttagcaaacaaaccagctaacaccattacagcactggttaagtagatttttactggcactggctggcgttcagctgaggaaggctaggatacagactttaatgaccaagagccagactagctcgagctagaaatcagcaacaaatacctccttgtgctatttgaatgctaaggtattagttgcaataggcttacgccttcgctcctctagtgaggggaatgagcctgatgacactattactgtttacctgtcaaaccagggtggaaatttagagggatgcaagtacagtatgtctcattaagcagtctctgttgctgattatatgaagataaaattgttgtatatgctgatctgtatgttatgtacattttcacagtgattgaatcattgtaaaaagaaaaaagacaaaaaagaatcaccactgtctattttatgaagatgataaagcagctttattaaattattacagttatgtttcaaatggtgttatctgccacattgtttccttttatctggtggttctctgtttccccctttaaatgtgttttctctgcttcaaaaatttaatgcattttagtattaaaggctattatggaaaaagta

SEQ ID NO: 2 - RNA, 9756 nt, Homo sapiens
  source 1..9756: mol_type = mRNA
agtagtttgcggcatccggaggagcagcagcagcagtagcggcggcggctggcgcagcgcggagacggacgagcgggcacagacggcagcacagctcccgtgcaccatgcctggcttgcccgggaggcactggcacccgcgtccctagcccggcgctggcccttggcgcgttgcgctccgcagcattccggctgagcgatttcatccgaaatcctaaacctcctaccccaaacccattgcctcctgcttgctcatactccacactcacactccccacaccacacactcactcttcctctctctctcacacattcacacacagcccgagacagacagagaaagcgagacagacctcccgagtgcgcgagcgcccgggaggaagggagcccaacgcagcgcggccagcgcctctccgggaagatgaaatcaagacgctcctgcaagtaaacttcggcggcgacaaaatcgtcgactgtggcagctgctgaggcggaccccagcgacgtgcaactgagctaggagggcttcctcccgcggcggcggcggcggcggcggcggcggcggaccttggagcgacaccccagcccaaacggagagaagagaagcacccggtacccacggcggcggccccgcctctcctggccggtactgttgttgcctccccttccctcttccccattccccgccacccccggccattagaaagaccggggctttgattttcttggacaaattgccatctccccgtttccacaaacttgacgtggagggtcggactgcgttgttaactttgatttcctagacgaaaacgcccgcagaccctcaactgctctgtggggggaactccgctcccacctcggatcctggacagacgcgcccccaagcccttcgaagccagccttagcgcgagggagcgcgctcaagctctggcagcctctctcccctcccccttcctctgctggccccgggaccgccatccgactcaaccctataaccgggtgcccgcggcgcttgccagtaactgactcccgtctgcgacaccccctttctcccgaacaggcctcgaagaggccagtgtggcccccccagaccccggagggcgcattccaagcgggtactctctccgcagtgaactgggagcgctggggggaggtctttgcgcatgccaggtgcacagacagcgagttcgccagcctcagtgccggtgcaccgcggcgggccgggcagtgcctgaaaggctgcgcctcctccgccctctttaccttcgcctcaagtactgtccggactcagcggtgcgtcctccaggccgcgcagacgccgcccgacccgcagccctgggcggctgccgacagtcgcgcccggctaactttgaaggggtaaaactgagtagccgggctggagggagggggctcggggccgcgcggcgctcccttggcccctcggagcccccggggcccccgcgagcccccgccgcgtccgccgcaacctcagcattggagccgccgcgggtgtcccccgcgcgccgccgggccgccctgggcgggacttctcccgcggcctccggggccacggggcgcgcgcaacaggcggcccgagccggcgggaagctggagcgccgacggcgtcggtctcggaggggtgtggagaggcgaggccaggcagagccccgtgcagccatggagtcgctcctgctgccggtgctgctgctgctggccatactgtggacgcaggctgccgccctcattaatctcaagtactcggtagaagaggagcagcgcgccgggacggtgattgccaacgtggccaaagacgcgcgagaggcgggcttcgcgctggacccccggcaggcttcagcctttcgcgtggtgtccaactcggctccacacctagtggacatcaatcccagctctggcctgctggtcaccaagcagaagattgaccgtgatctgctgtgccgccagagccccaagtgcatcatctcgctcgaggtcatgtccagctcaatggaaatctgcgtgataaaggtggagatcaaggacctgaacgacaatgcgcccagtttcccggcagcacagatcgagctggagatctcggaggcagccagccctggcacgcgcatcccgctggacagcgcttacgatccagactcaggaagctttggcgtgcagacttacgagctcacgcccaacgagctgttcggcctggagatcaagacgcgcggcgacggctcccgctttgccgaactcgtggtggaaaagagcctggaccgcgagacgcagtcgcactacagcttccgaatcactgcgctagacggtggcgacccgccgcgcctgggcaccgttggccttagtatcaaggtgaccgactccaatgacaacaacccggtgtttagcgagtccacctacgcggtgagcgtgccagaaaactcgcctcccaacacacccgtcatccgcctcaacgccagcgatccagacgagggcaccaacggccaggtggtctactccttctatggctacgtcaacgaccgcacgcgcgagctctttcagatcgacccgcacagtggcctggtcactgtcactggcgctttagactacgaagaggggcacgtgtacgaactggacgtgcaggctaaggacttggggcccaattccatcccggcacactgcaaggtcaccgtcagcgtgctggacaccaatgacaatccgccggtcatcaacctgctgtcagtcaacagtgagcttgtggaggtcagcgagagcgcccccccgggctacgtgatcgccttggtgcgggtgtctgatcgcgactcaggcctcaatggacgtgtgcagtgccgtttgctgggcaatgtgccctttcgactgcaggaatatgagagcttctccactattctggtggacggacggctggaccgcgagcagcacgaccaatacaacctcacaattcaggcacgcgacggcggcgtgcccatgctgcagagtgccaagtcctttaccgtgctcatcactgacgaaaatgacaaccacccgcacttttccaagccctactaccaggtcattgtgcaggagaacaacacgcctggcgcctatctgctctctgtgtctgctcgcgaccccgacctgggtctcaacggcagtgtctcctaccagatcgtgccgtcgcaggtgcgggacatgcctgtcttcacctatgtctccatcaatcccaactcaggcgacatctacgcgctgcgatcctttaaccacgagcagaccaaggcgttcgaattcaaggtgctggccaaggacggcggccttccctcactgcaaagcaacgctacggtgcgggtcatcatcctcgacgtcaacgacaacaccccggtcatcacagccccacctctgattaacggcactgccgaggtctacataccccgcaactctggcataggctacctggtgactgttgtcaaggcagaagactacgatgagggcgaaaatggccgagtcacctacgacatgaccgagggcgaccgcggcttctttgaaatagaccaggtcaatggcgaagtcagaaccacccgcaccttcggggagagctccaagtcctcctatgagcttatcgtggtggctcacgaccacggcaagacatctctctctgcctctgctctcgtcctaatctacttgtcccctgctctcgatgcccaagagtcaatgggctctgtgaacttgtccttgattttcattattgccctgggctccattgcgggcatcctctttgtaactatgatcttcgtggcaatcaagtgcaagcgagacaacaaagagatccggacctacaactgcagtaattgtttaaccatcacttgtctcctcggctgttttataaaaggacaaaacagcaagtgtctgcattgcatctcggtttctcccattagcgaggagcaagacaaaaagacagaggagaaagtgagcctaaggggaaagagaattgctgagtactcctatgggcatcaaaagaaatcaagcaagaagaaaaaaatcagtaagaatgacatccgcctggtaccccgggatgtggaggagacagacaagatgaacgttgtcagttgctcttccctgacctcctccctcaactattttgactaccaccagcagacgctgcccctgggctgccgccgctctgagagcactttcctgaatgtggagaaccagaatacccgcaacaccagtgctaaccacatctaccatcactctttcaacagccaggggccccagcagcctgacctgattatcaacggtgtgcctctgcctgagactgaaaactattcttttgactccaactacgtgaatagccgagcccatttaatcaagagcagctccaccttcaaggacttagagggcaacagcctgaaggatagtggacatgaggagagtgaccaaactgacagtgagcatgatgtccagcggagcctgtattgtgatactgctgtcaacgatgtgctgaacaccagtgtgacctccatgggatctcagatgcctgatcatgatcagaatgaaggatttcattgccgggaagaatgccggattcttggccactctgacaggtgctggatgccccggaaccccatgcccatccgttccaagtcccctgagcatgtgaggaacatcatcgcgctgtctattgaagctactgctgctgatgtcgaggcttatgacgactgcggccccaccaaacggactttcgcaacctttgggaaagatgtcagcgaccacccggctgaggagaggcctaccctgaaaggcaagaggactgtcgatgtgaccatctgcagccccaaggtcaacagcgttatccgggaggcaggcaatggctgtgaggcgattagccctgtcacctcccccctccacctcaagagctctctgcccaccaagccttccgtgtcttacaccattgccctggctcccccagcccgtgatctggagcagtatgtcaacaatgtcaacaatggccctactcgtccctctgaagctgagccccgtggagctgatagcgagaaagtcatgcatgaggtcagccccattctgaaggaaggtcgcaacaaagagtcccctggtgtgaagcgtctgaaggatatcgttctctaaaccagtctccaggaagaagagaaagaaaccacactggctagtgaagaagcaggagcttcttgttttaattgctcaccaatggttggttcttgagtggctatatttcagagcttttcctaaatgtattgtttataggtgattatcattctgtgacagtcccttgtttcaacaggcagcaggggtgttcagttggagcaaattagctttggcttgagttgttcatggggccttgatgttggggaaacagagacaaattcagttgtgaaaagtattatgtattaagtgtttgaatttatatatttttctatgtcaaaattataatataaattaccattgtttgtggaggattacatttaaaaaagcaaaaagtgaaaaaaaaaagctctggacacctttaataagctcgccactgttttttgtagtgtagacaagttaatggtcatttattgtgtactattcattgattcagtgatgtgaaattgagcccccaaaaggttgtttctgaagctcgagtacttcccaatgccgctactttgctgtggacacccctgctttaaaaacccttttgctagctgtgctattgttgtatttgatattgcaaattgctatgtgtgtggtgatggcaaaaggcttttaaaagttggtgttttctttttcttaaaaaaataataaaactacagacaaaaacaaagtgcaaacaactgagacagcaaatgaatgagcaacaccatgcatatagattgagtacttggagaatactcacgttttttaactcatgtagtgattgctcaccactttgcaaagtatttttcctgcctttcagtggtctgcccaggtccatgatagatcattgcagaaagtcatttttggataggctgctatctaatttgcagttgtcagaaatactgtgctgaaagttttatgacatccatcttttaaattttcaggccctgaacaggaaagttgctcctgaagttatgtttccaggcttagaaattccctctctccaatcatctaaaattgaagatgactgaatctattttaagatctaaattagcatctcttcagacacacacttcctgattcagtgtttcccaatcatgattagaattagactgcaaagcacgtcatgggctgggattgagaactccatgttgctctgtatcttaggcttatatacgtagggatagagtaagcagtacaaagtgtatattttggaaaagacaggtaacaggtaacagcatcgctaatccaattactgtgccttctaaacggagacactcagacacttgaactcatctttttatgactaatagttttttgattaaaaatgtgaacaagaaaatactaaaataaaaatcctttcgatttagccaactctttttgctgtaggctaggaatacaccctttttaaattaacacactgtagatcctttttttctgttttaacattcctctaactcccccatttatcttttgtctattaatattcactagccaacatagtatttttgcagcctaagagttcattatttaaaaataaactaaagaaatatgtcacctttgttctgccttggtcttaagagagttgtttctagagaaacaagttttatggttctgttttcatttgtttcattttttgaaattcaggaatacacagagagaaggcctagaggttagagcactagaatgcaaaagaggatttattttcttaagtttaggtagataagtcagctcttttgaatgttttacttatttttgcctgagttcctagctttacgcattactaggaatattttcttttacaggagggagaagggttttgagggagggggtgggtaaggcagtagggatggggttaggtaggggagaacatttctgaaaaagaacttataatgaagctacaaatccatccttatttcttattcagtgctgaatactacctcatgcaaaatattggtgtggctgcaaatttccctctgaagctgacacaattaaggatgaattaccataacatcttcatttttcctcatttcattgcctctcatacagttttctccctctgatttatttcattttggtagtggattttgaattaagtatttatttctctttgcaagtgactatttgattaacacattaaaaattttttaaaaatttcccctttaagttatgatggctgcctatagaatttagactgtttctcaccctgatccatcctgatattatgttattagctacgatttcaaggtcactttgaagtcagacttcacagttttctacaggtgtatttcttgctatgctcagtgggaaccagggagcagaaaagattgtggaaagtgggaacattaattgtcacgtggctgttgagccagagaggccactggctgccatgcctcttaccagccaagttttaaatggttagagtggcattggcattgattttgcttttctcttgggttttcttcatttcttttcataattcatcttcaagctatagatccatccttcttccctatccaaatactttgttctcagtgggcagtcagatttttttggcttccaaacctcactgagcatgttcagagaattcctctcattaaggaaatatttttccccacaattgtctgatgtatgagtcctctcagaagcacaagtgcatactaggaaggctttgtaaactggttttgtaggcaggctgtacctgcaaataggcattctgagcaaggatcctaaatttccctttggctcatgtcccccccgccccaccccaccttctcctttttggcatgtctggtgaaaagctacaaggttcacagggccaaatattctcccttttgttctctaaacatgttgcacacataaactcaagggagtgatttcggttcctaagtcctagggagttctattccatttattctgatgtcccttttaaggaggagttggtgttgaagtgtgacatgctttaatgataactgctttggcaattccccagacaggtatacttcttcatccaaaattgcacctaaggtgttcatttagacaaaattgttcgcttagtgatccactgatctctaatcagaaatatttttaaaaaatacaatttagatctctgaaaattggaaccactcaagagtatcatcttgatagtgttacttcagcatatgactgactgattttatgaagggagtttagctgacttttccctgtagccctatcatattaaaaacaaaaagtggtccacttgaagcagcaaggacaaagggcagtttagggagaggcagggtgaaggggatagctcgattgggcatccagagtggaaaaggattattattgtacataatagcagttctggctggaattccaatccactttctggggatcattttgatgttgaatgttcccccaaagcattctgacaagtttggtccacttggctctttaccccgggtaataagacccttattgactttgaaaaactggcataaatgagcttaagaaatccattgtatacagtcctagtgtttgccttcttggtaaaattacatttaaggatgtcatttcatgagtcaaattgtatctgctgacactgaagtgtattgagatgttgttctttagtttaagtatgtaacaaagtaatattcaaaggggatgtttgggggtggggctgggaccgggtggctttatattgataatgaaatattccagagcaaaacacattgtcctaatgaagttgttgcagctctcttcgttttcttgtgccgctggaattggcttgtgggtcacttgttgtgcaaaagtgaattaatttcaaataggaatcatattgcttttgtgaaacaaagaaaatttaccaccttgtctgatacatagattggaaggcgctcttggtaaagaataacccacaaacacctgatcttgattggaaagcattgtaggtcattagggaaaactgatgatgctgactgttgctccagctgtgttggcaattcaagatgaccttgttactaactgaaagttgctgtcaaccttagcaaacaaaccagctaacaccattacagcactggttaagtagatttttactggcactggctggcgttcagctgaggaaggctaggatacagactttaatgaccaagagccagactagctcgagctagaaatcagcaacaaatacctccttgtgctatttgaatgctaaggtattagttgcaataggcttacgccttcgctcctctagtgaggggaatgagcctgatgacactattactgtttacctgtcaaaccagggtggaaatttagagggatgcaagtacagtatgtctcattaagcagtctctgttgctgattatatgaagataaaattgttgtatatgctgatctgtatgttatgtacattttcacagtgattgaatcattgtaaaaagaaaaaagacaaaaaagaatcaccactgtctattttatgaagatgataaagcagctttattaaattattacagttatgtttcaaatggtgttatctgccacattgtttccttttatctggtggttctctgtttccccctttaaatgtgttttctctgcttcaaaaatttaatgcattttagtattaaaggctattatggaaaaagta

SEQ ID NO: 3 - DNA, 23 bp, synthetic construct
  source 1..23: mol_type = other DNA
gctaaccacatctaccatcactc

SEQ ID NO: 4 - DNA, 22 bp, synthetic construct
  source 1..22: mol_type = other DNA
gctattcacgtagttggagtca

SEQ ID NO: 5 - DNA, 24 bp, synthetic construct
  source 1..24: mol_type = other DNA
tttcagtctcaggcagaggcacac

SEQ ID NO: 6 - DNA, 19 bp, synthetic construct
  source 1..19: mol_type = other DNA
gaaggtgaaggtcggagtc

SEQ ID NO: 7 - DNA, 20 bp, synthetic construct
  source 1..20: mol_type = other DNA
gaagatggtgatgggatttc

SEQ ID NO: 8 - DNA, 20 bp, synthetic construct
  source 1..20: mol_type = other DNA
caagcttcccgttctcagcc

SEQ ID NO: 9-14 - skipped (6 entries)

SEQ ID NO: 15 - DNA, 20 bp, synthetic construct
  source 1..20: mol_type = other DNA
gcttctttattaattaccca

SEQ ID NO: 16 - DNA, 20 bp, synthetic construct
  source 1..20: mol_type = other DNA
actgctattatgtacaataa

SEQ ID NO: 17 - DNA, 20 bp, synthetic construct
  source 1..20: mol_type = other DNA
ttctttttctctctcatcta

SEQ ID NO: 18 - DNA, 20 bp, synthetic construct
  source 1..20: mol_type = other DNA
cccactattttcatcacatc

SEQ ID NO: 19 - DNA, 20 bp, synthetic construct
  source 1..20: mol_type = other DNA
gcttgttttcttcctctcct

SEQ ID NO: 20 - DNA, 20 bp, synthetic construct
  source 1..20: mol_type = other DNA
gctgtcacttttccatacta

SEQ ID NO: 21 - DNA, 20 bp, synthetic construct
  source 1..20: mol_type = other DNA
acatcatttttcatgtggtc

SEQ ID NO: 22 - DNA, 20 bp, synthetic construct
  source 1..20: mol_type = other DNA
attctctctcatttccaccc

SEQ ID NO: 23 - DNA, 20 bp, synthetic construct
  source 1..20: mol_type = other DNA
gttagctttctttccatttc

SEQ ID NO: 24 - DNA, 20 bp, synthetic construct
  source 1..20: mol_type = other DNA
ttgtttttttcatatcccta

SEQ ID NO: 25 - DNA, 20 bp, synthetic construct
  source 1..20: mol_type = other DNA
cttaggctcactttctcctc

SEQ ID NO: 26 - DNA, 20 bp, synthetic construct
  source 1..20: mol_type = other DNA
ggtcactctcctcatgtcca

SEQ ID NO: 27 - DNA, 20 bp, synthetic construct
  source 1..20: mol_type = other DNA
gtttatttacttttttatgc

SEQ ID NO: 28 - DNA, 20 bp, synthetic construct
  source 1..20: mol_type = other DNA
catcattcctctttttcctc

SEQ ID NO: 29 - DNA, 20 bp, synthetic construct
  source 1..20: mol_type = other DNA
gcttagttatatctcacccc

SEQ ID NO: 30 - DNA, 20 bp, synthetic construct
  source 1..20: mol_type = other DNA
tctctgtttccccaacatca

SEQ ID NO: 31 - DNA, 20 bp, synthetic construct
  source 1..20: mol_type = other DNA
gcacttatcattctatgcta

SEQ ID NO: 32 - DNA, 20 bp, synthetic construct
  source 1..20: mol_type = other DNA
tttgatgcttttactctact

SEQ ID NO: 33 - DNA, 20 bp, synthetic construct
  source 1..20: mol_type = other DNA
ccagagcttttttttttcac

SEQ ID NO: 34 - DNA, 20 bp, synthetic construct
  source 1..20: mol_type = other DNA
gcctgctttctgcttcaatc

SEQ ID NO: 35 - DNA, 20 bp, synthetic construct
  source 1..20: mol_type = other DNA
gctcttttctgataacctat

SEQ ID NO: 36 - DNA, 20 bp, synthetic construct
  source 1..20: mol_type = other DNA
gcatcattcattttcagcaa

SEQ ID NO: 37 - DNA, 20 bp, synthetic construct
  source 1..20: mol_type = other DNA
ccatgtttctattactgctc

SEQ ID NO: 38 - DNA, 20 bp, synthetic construct
  source 1..20: mol_type = other DNA
atttttatcttatttcattc

SEQ ID NO: 39 - DNA, 20 bp, synthetic construct
  source 1..20: mol_type = other DNA
actgtgccttattctcactc

SEQ ID NO: 40 - DNA, 20 bp, synthetic construct
  source 1..20: mol_type = other DNA
gctgcttctttctttacttt

SEQ ID NO: 41 - DNA, 20 bp, synthetic construct
  source 1..20: mol_type = other DNA
ttctgattttgatcctcact

SEQ ID NO: 42 - DNA, 20 bp, synthetic construct
  source 1..20: mol_type = other DNA
tgcattttttcctataatct

SEQ ID NO: 43 - DNA, 20 bp, synthetic construct
  source 1..20: mol_type = other DNA
catcttgtctccattccata

SEQ ID NO: 44 - DNA, 20 bp, synthetic construct
  source 1..20: mol_type = other DNA
ctttgtttcctactgccata

SEQ ID NO: 45 - DNA, 20 bp, synthetic construct
  source 1..20: mol_type = other DNA
tgacatatttctttagttta

SEQ ID NO: 46 - DNA, 20 bp, synthetic construct
  source 1..20: mol_type = other DNA
tcatagtctccatttatcca

SEQ ID NO: 47 - DNA, 20 bp, synthetic construct
  source 1..20: mol_type = other DNA
gcatccctctaaatttccac

SEQ ID NO: 48 - DNA, 20 bp, synthetic construct
  source 1..20: mol_type = other DNA
agcagttttaatccttcctc

SEQ ID NO: 49 - DNA, 20 bp, synthetic construct
  source 1..20: mol_type = other DNA
atgtttatttctctatgcct

SEQ ID NO: 50 - DNA, 20 bp, synthetic construct
  source 1..20: mol_type = other DNA
gtttgtttttttcctcttca

SEQ ID NO: 51 - DNA, 20 bp, synthetic construct
  source 1..20: mol_type = other DNA
gcttgcctttttttcttccc

SEQ ID NO: 52 - DNA, 20 bp, synthetic construct
  source 1..20: mol_type = other DNA
cctactatctttcttctcca

SEQ ID NO: 53 - DNA, 20 bp, synthetic construct
  source 1..20: mol_type = other DNA
cttttttatttcatctcagt

SEQ ID NO: 54 - DNA, 20 bp, synthetic construct
  source 1..20: mol_type = other DNA
atggacactttcatccccct

SEQ ID NO: 55 - DNA, 20 bp, synthetic construct
  source 1..20: mol_type = other DNA
cttgatttcatcttcccgga

SEQ ID NO: 56 - DNA, 20 bp, synthetic construct
  source 1..20: mol_type = other DNA
ctgctttgtcttcacttctc

SEQ ID NO: 57 - DNA, 20 bp, synthetic construct
  source 1..20: mol_type = other DNA
cttctttttcaacctccttt

SEQ ID NO: 58 - DNA, 20 bp, synthetic construct
  source 1..20: mol_type = other DNA
actttattagtctacttctt

SEQ ID NO: 59 - DNA, 20 bp, synthetic construct
  source 1..20: mol_type = other DNA
cctatttattcttccataca

SEQ ID NO: 60 - DNA, 20 bp, synthetic construct
  source 1..20: mol_type = other DNA
gagtctgttttatctatcca

SEQ ID NO: 61 - DNA, 20 bp, synthetic construct
  source 1..20: mol_type = other DNA
gtgatttttctccctcccca

SEQ ID NO: 62 - DNA, 20 bp, synthetic construct
  source 1..20: mol_type = other DNA
tctattttcccttctcacct

SEQ ID NO: 63 - DNA, 20 bp, synthetic construct
  source 1..20: mol_type = other DNA
gctatttttactgaaacatc

SEQ ID NO: 64 - DNA, 20 bp, synthetic construct
  source 1..20: mol_type = other DNA
ggtttctttctcttcttcct

SEQ ID NO: 65 - DNA, 20 bp, synthetic construct
  source 1..20: mol_type = other DNA
ttctcatttttactgcctca

SEQ ID NO: 66 - DNA, 20 bp, synthetic construct
  source 1..20: mol_type = other DNA
atattctctttttccctccc

SEQ ID NO: 67 - DNA, 20 bp, synthetic construct
  source 1..20: mol_type = other DNA
gcggatgtcattcttactga

SEQ ID NO: 68 - DNA, 20 bp, synthetic construct
  source 1..20: mol_type = other DNA
aacaattttatcttcatata

SEQ ID NO: 69 - DNA, 20 bp, synthetic construct
  source 1..20: mol_type = other DNA
gttctttttcagaaatgttc

SEQ ID NO: 70 - DNA, 20 bp, synthetic construct
  source 1..20: mol_type = other DNA
actgcttactctatccctac

SEQ ID NO: 71 - DNA, 20 bp, synthetic construct
  source 1..20: mol_type = other DNA
ccttgtgtcatttttttctc

SEQ ID NO: 72 - DNA, 20 bp, synthetic construct
  source 1..20: mol_type = other DNA
ctccattttccttctttttc

SEQ ID NO: 73 - DNA, 20 bp, synthetic construct
  source 1..20: mol_type = other DNA
cttctttttctatttctaaa

SEQ ID NO: 74 - DNA, 20 bp, synthetic construct
  source 1..20: mol_type = other DNA
tgccttatttttctccatat

SEQ ID NO: 75 - DNA, 20 bp, synthetic construct
  source 1..20: mol_type = other DNA
gtgtcattttccctacgcag

SEQ ID NO: 76 - DNA, 20 bp, synthetic construct
  source 1..20: mol_type = other DNA
actcattttccatctatgaa

SEQ ID NO: 77 - DNA, 20 bp, synthetic construct
  source 1..20: mol_type = other DNA
gcttctcattttatttggga

SEQ ID NO: 78 - DNA, 20 bp, synthetic construct
  source 1..20: mol_type = other DNA
gctggtatttttctttgtgc

SEQ ID NO: 79 - DNA, 20 bp, synthetic construct
  source 1..20: mol_type = other DNA
ctgatgttttattttcatta

SEQ ID NO: 80 - DNA, 20 bp, synthetic construct
  source 1..20: mol_type = other DNA
gcttcagtttttaacctctc

SEQ ID NO: 81 - DNA, 20 bp, synthetic construct
  source 1..20: mol_type = other DNA
gttcatttcctatttcattt

SEQ ID NO: 82 - DNA, 20 bp, synthetic construct
  source 1..20: mol_type = other DNA
gttcacatttttaatcaaaa

SEQ ID NO: 83 - DNA, 20 bp, synthetic construct
  source 1..20: mol_type = other DNA
tctatattttctgctacctt

SEQ ID NO: 84 - DNA, 20 bp, synthetic construct
  source 1..20: mol_type = other DNA
gtacaccctttcctcatcct

SEQ ID NO: 85 - DNA, 20 bp, synthetic construct
  source 1..20: mol_type = other DNA
gcatcatcagttttccctaa

SEQ ID NO: 86 - DNA, 20 bp, synthetic construct
  source 1..20: mol_type = other DNA
acttgtttgattttcatcct

SEQ ID NO: 87 - DNA, 20 bp, synthetic construct
  source 1..20: mol_type = other DNA
ccaatctcatatcaggatta

SEQ ID NO: 88 - DNA, 20 bp, synthetic construct
  source 1..20: mol_type = other DNA
aagaggatcttaaaagctat

SEQ ID NO: 89 - DNA, 20 bp, synthetic construct
  source 1..20: mol_type = other DNA
cttgtcaatcactcttttta

SEQ ID NO: 90 - DNA, 20 bp, synthetic construct
  source 1..20: mol_type = other DNA
tgggatatccacatcatcaa

SEQ ID NO: 91 - DNA, 20 bp, synthetic construct
  source 1..20: mol_type = other DNA
aaattcaagccccatgatac

SEQ ID NO: 92 - DNA, 20 bp, synthetic construct
  source 1..20: mol_type = other DNA
gccccatgatacccctaatc

SEQ ID NO: 93 - DNA, 20 bp, synthetic construct
  source 1..20: mol_type = other DNA
gttgtttttttcatatccct

SEQ ID NO: 94 - DNA, 20 bp, synthetic construct
  source 1..20: mol_type = other DNA
acttctttttctatttctaa

SEQ ID NO: 95 - DNA, 20 bp, synthetic construct
  source 1..20: mol_type = other DNA
cgtacattttcataccaaga

SEQ ID NO: 96 - DNA, 20 bp, synthetic construct
  source 1..20: mol_type = other DNA
caacaattttatcttcatat

SEQ ID NO: 97 - DNA, 20 bp, synthetic construct
  source 1..20: mol_type = other DNA
tccagagcttttttttttca

SEQ ID NO: 98 - DNA, 20 bp, synthetic construct
  source 1..20: mol_type = other DNA
cccactcctcttctcatctt

SEQ ID NO: 99 - DNA, 20 bp, synthetic construct
  source 1..20: mol_type = other DNA
ccattttcttccttcatcat

SEQ ID NO: 100 - DNA, 20 bp, synthetic construct
  source 1..20: mol_type = other DNA
accagctatttccttccatc

SEQ ID NO: 101 - DNA, 20 bp, synthetic construct
  source 1..20: mol_type = other DNA
gctttatattctctctacct

SEQ ID NO: 102 - DNA, 20 bp, synthetic construct
  source 1..20: mol_type = other DNA
ctgcacacttcttcactccc

SEQ ID NO: 103 - DNA, 20 bp, synthetic construct
  source 1..20: mol_type = other DNA
gatatttttatcttatttca

SEQ ID NO: 104 - DNA, 20 bp, synthetic construct
  source 1..20: mol_type = other DNA
gcatttgttctacctcattc

SEQ ID NO: 105 - DNA, 20 bp, synthetic construct
  source 1..20: mol_type = other DNA
ttctgccttatttttctcca

SEQ ID NO: 106 - DNA, 20 bp, synthetic construct
  source 1..20: mol_type = other DNA
actcacattgaatcctcaca

SEQ ID NO: 107 - DNA, 20 bp, synthetic construct
  source 1..20: mol_type = other DNA
actgatgttttattttcatt

SEQ ID NO: 108 - DNA, 20 bp, synthetic construct
  source 1..20: mol_type = other DNA
ccttctttttcaacctcctt

SEQ ID NO: 109 - DNA, 20 bp, synthetic construct
  source 1..20: mol_type = other DNA
tggtttctttctcttcttcc

SEQ ID NO: 110 - DNA, 20 bp, synthetic construct
  source 1..20: mol_type = other DNA
cttccttgtatacttgtatt

SEQ ID NO: 111 - DNA, 20 bp, synthetic construct
  source 1..20: mol_type = other DNA
gttgctgtcacttttccata

SEQ ID NO: 112 - DNA, 20 bp, synthetic construct
  source 1..20: mol_type = other DNA
gtttcatttctattatttta

SEQ ID NO: 113 - DNA, 20 bp, synthetic construct
  source 1..20: mol_type = other DNA
atgcattttttcctataatc

SEQ ID NO: 114 - DNA, 20 bp, synthetic construct
  source 1..20: mol_type = other DNA
gtacggatttttctccacct

SEQ ID NO: 115 - DNA, 20 bp, synthetic construct
  source 1..20: mol_type = other DNA
tatattctctttttccctcc

SEQ ID NO: 116 - DNA, 20 bp, synthetic construct
  source 1..20: mol_type = other DNA
ttctattttcccttctcacc

SEQ ID NO: 117 - DNA, 20 bp, synthetic construct
  source 1..20: mol_type = other DNA
acttttgttttacacattcc

SEQ ID NO: 118 - DNA, 20 bp, synthetic construct
  source 1..20: mol_type = other DNA
gtgctccttttacatatcct

SEQ ID NO: 119 - DNA, 20 bp, synthetic construct
  source 1..20: mol_type = other DNA
tttctcatttttactgcctc

SEQ ID NO: 120 - DNA, 20 bp, synthetic construct
  source 1..20: mol_type = other DNA
gcacttttctttgctctcat

SEQ ID NO: 121 - DNA, 20 bp, synthetic construct
  source 1..20: mol_type = other DNA
gctcttctatagatttcatt

SEQ ID NO: 122 - DNA, 20 bp, synthetic construct
  source 1..20: mol_type = other DNA
acttttggttccctctcttt

SEQ ID NO: 123 - DNA, 20 bp, synthetic construct
  source 1..20: mol_type = other DNA
cccacatttttctcctataa

SEQ ID NO: 124 - DNA, 20 bp, synthetic construct
  source 1..20: mol_type = other DNA
ttgatttcttttgatgccca

SEQ ID NO: 125 - DNA, 20 bp, synthetic construct
  source 1..20: mol_type = other DNA
gtcatttattactttgcaca

SEQ ID NO: 126 - DNA, 20 bp, synthetic construct
  source 1..20: mol_type = other DNA
agtgatttttctccctcccc

SEQ ID NO: 127 - DNA, 20 bp, synthetic construct
  source 1..20: mol_type = other DNA
gctatcttccattcagcact

SEQ ID NO: 128 - DNA, 20 bp, synthetic construct
  source 1..20: mol_type = other DNA
gcccatgtttctattactgc

SEQ ID NO: 129 - DNA, 20 bp, synthetic construct
  source 1..20: mol_type = other DNA
cttctccattttccttcttt

SEQ ID NO: 130 - DNA, 20 bp, synthetic construct
  source 1..20: mol_type = other DNA
tcctatttattcttccatac

SEQ ID NO: 131 - DNA, 20 bp, synthetic construct
  source 1..20: mol_type = other DNA
gtttggtattttctatcctc

SEQ ID NO: 132 - DNA, 20 bp, synthetic construct
  source 1..20: mol_type = other DNA
gtttcttcttttctcccttt

SEQ ID NO: 133 - DNA, 20 bp, synthetic construct
  source 1..20: mol_type = other DNA
tgttcatttcctatttcatt

SEQ ID NO: 134 - DNA, 20 bp, synthetic construct
  source 1..20: mol_type = other DNA
tgcattttcttcctccaata

SEQ ID NO: 135 - DNA, 20 bp, synthetic construct
  source 1..20: mol_type = other DNA
gcttattttttaatttagtt

SEQ ID NO: 136 - DNA, 20 bp, synthetic construct
  source 1..20: mol_type = other DNA
acatcattcctctttttcct

SEQ ID NO: 137 - DNA, 20 bp, synthetic construct
  source 1..20: mol_type = other DNA
gttaatttcttctaacatta

SEQ ID NO: 138 - DNA, 20 bp, synthetic construct
  source 1..20: mol_type = other DNA
cgtcttgatttcatcttccc

SEQ ID NO: 139 - DNA, 20 bp, synthetic construct
  source 1..20: mol_type = other DNA
acttatgctttctctatgtc

SEQ ID NO: 140 - DNA, 20 bp, synthetic construct
  source 1..20: mol_type = other DNA
ttctttgtttcctactgcca

SEQ ID NO: 141 - DNA, 20 bp, synthetic construct
  source 1..20: mol_type = other DNA
tcagcatcatcagttttccc

SEQ ID NO: 142 - DNA, 20 bp, synthetic construct
  source 1..20: mol_type = other DNA
acttgcatccctctaaattt

SEQ ID NO: 143 - DNA, 20 bp, synthetic construct
  source 1..20: mol_type = other DNA
atgcttgttttcttcctctc

SEQ ID NO: 144 - DNA, 20 bp, synthetic construct
  source 1..20: mol_type = other DNA
tctgattcttattcctccca

SEQ ID NO: 145 - DNA, 20 bp, synthetic construct
  source 1..20: mol_type = other DNA
tctccatatcacttatcttc

SEQ ID NO: 146 - DNA, 20 bp, synthetic construct
  source 1..20: mol_type = other DNA
gtcaccttttcatttatcca

SEQ ID NO: 147 - DNA, 20 bp, synthetic construct
  source 1..20: mol_type = other DNA
gcacagactttattagtcta

SEQ ID NO: 148 - DNA, 20 bp, synthetic construct
  source 1..20: mol_type = other DNA
ttgtctgtctcctccacatc

SEQ ID NO: 149 - DNA, 20 bp, synthetic construct
  source 1..20: mol_type = other DNA
gtatattttttcacacttct

SEQ ID NO: 150 - DNA, 20 bp, synthetic construct
  source 1..20: mol_type = other DNA
gtgacatatttctttagttt

SEQ ID NO: 151 - DNA, 20 bp, synthetic construct
  source 1..20: mol_type = other DNA
tcttccttttatttagttaa

SEQ ID NO: 152 - DNA, 20 bp, synthetic construct
  source 1..20: mol_type = other DNA
tccacatttttcattcatct

SEQ ID NO: 153 - DNA, 20 bp, synthetic construct
  source 1..20: mol_type = other DNA
ctgctttatcacattaactt

SEQ ID NO: 154 - DNA, 20 bp, synthetic construct
  source 1..20: mol_type = other DNA
gtttatatttttaacaccct

SEQ ID NO: 155 - DNA, 20 bp, synthetic construct
  source 1..20: mol_type = other DNA
gtctctgtttccccaacatc

SEQ ID NO: 156 - DNA, 20 bp, synthetic construct
  source 1..20: mol_type = other DNA
atgccagtttttcaaagtca

SEQ ID NO: 157 - DNA, 20 bp, synthetic construct
  source 1..20: mol_type = other DNA
gtcattctctctcatttcca

SEQ ID NO: 158 - DNA, 20 bp, synthetic construct
  source 1..20: mol_type = other DNA
gcttttcttccatttcaagt

SEQ ID NO: 159 - DNA, 20 bp, synthetic construct
  source 1..20: mol_type = other DNA
gccacaccaatattttgcat

SEQ ID NO: 160 - DNA, 20 bp, synthetic construct
  source 1..20: mol_type = other DNA
attctctcttatcacctcat

SEQ ID NO: 161 - DNA, 20 bp, synthetic construct
  source 1..20: mol_type = other DNA
tactgcttactctatcccta

SEQ ID NO: 162 - DNA, 20 bp, synthetic construct
  source 1..20: mol_type = other DNA
atgtgtcctttcctttcccc

SEQ ID NO: 163 - DNA, 20 bp, synthetic construct
  source 1..20: mol_type = other DNA
attcatttatctatccagta

SEQ ID NO: 164 - DNA, 20 bp, synthetic construct
  source 1..20: mol_type = other DNA
tgttcacatttttaatcaaa

SEQ ID NO: 165 - DNA, 20 bp, synthetic construct
  source 1..20: mol_type = other DNA
gaaattcaagccccatgata

SEQ ID NO: 166 - DNA, 20 bp, synthetic construct
  source 1..20: mol_type = other DNA
aaagaggatcttaaaagcta

SEQ ID NO: 167 - DNA, 20 bp, synthetic construct
  source 1..20: mol_type = other DNA
atgggatatccacatcatca

SEQ ID NO: 168 - DNA, 20 bp, synthetic construct
  source 1..20: mol_type = other DNA
agccccatgatacccctaat

SEQ ID NO: 169 - DNA, 20 bp, synthetic construct
  source 1..20: mol_type = other DNA
acttgtcaatcactcttttt

SEQ ID NO: 170 - DNA, 20 bp, synthetic construct
  source 1..20: mol_type = other DNA
cccaatctcatatcaggatt

SEQ ID NO: 171 - DNA, 20 bp, synthetic construct
  source 1..20: mol_type = other DNA
gcatttcttttctaccagta

SEQ ID NO: 172 - DNA, 20 bp, synthetic construct
  source 1..20: mol_type = other DNA
ttgccttttctttttctcaa

SEQ ID NO: 173 - DNA, 20 bp, synthetic construct
  source 1..20: mol_type = other DNA
gtggtttctttctcttcttc

SEQ ID NO: 174 - DNA, 20 bp, synthetic construct
  source 1..20: mol_type = other DNA
cccattttcttccttcatca

SEQ ID NO: 175 - DNA, 20 bp, synthetic construct
  source 1..20: mol_type = other DNA
aggtcatcttgaattgccaa

SEQ ID NO: 176 - DNA, 20 bp, synthetic construct
  source 1..20: mol_type = other DNA
tgtacttgcatccctctaaa

SEQ ID NO: 177 - DNA, 20 bp, synthetic construct
  source 1..20: mol_type = other DNA
catacttccttatttttctt

SEQ ID NO: 178 - DNA, 20 bp, synthetic construct
  source 1..20: mol_type = other DNA
gcatcagtctatatataaca

SEQ ID NO: 179 - DNA, 20 bp, synthetic construct
  source 1..20: mol_type = other DNA
gctacaatttcaatagatat

SEQ ID NO: 180 - DNA, 20 bp, synthetic construct
  source 1..20: mol_type = other DNA
gttcactgttatcactccca

SEQ ID NO: 181 - DNA, 20 bp, synthetic construct
  source 1..20: mol_type = other DNA
actcattatcttccttttct

SEQ ID NO: 182 - DNA, 20 bp, synthetic construct
  source 1..20: mol_type = other DNA
ttctccatatcacttatctt

SEQ ID NO: 183 - DNA, 20 bp, synthetic construct
  source 1..20: mol_type = other DNA
tccttctttttcaacctcct

SEQ ID NO: 184 - DNA, 20 bp, synthetic construct
  source 1..20: mol_type = other DNA
cttaacttctatcttgtctc

SEQ ID NO: 185 - DNA, 20 bp, synthetic construct
  source 1..20: mol_type = other DNA
ctgctttatattctctctac

SEQ ID NO: 186 - DNA, 20 bp, synthetic construct
  source 1..20: mol_type = other DNA
gtattgttttttctaatcct

SEQ ID NO: 187 - DNA, 20 bp, synthetic construct
  source 1..20: mol_type = other DNA
gctcttttctttcatagcat

SEQ ID NO: 188 - DNA, 20 bp, synthetic construct
  source 1..20: mol_type = other DNA
gcataattttatctagcata

SEQ ID NO: 189 - DNA, 20 bp, synthetic construct
  source 1..20: mol_type = other DNA
ctcactttctcctctgtctt

SEQ ID NO: 190 - DNA, 20 bp, synthetic construct
  source 1..20: mol_type = other DNA
gcctattttcctttcttcga

SEQ ID NO: 191 - DNA, 20 bp, synthetic construct
  source 1..20: mol_type = other DNA
gcatctttattactagcggt

SEQ ID NO: 192 - DNA, 20 bp, synthetic construct
  source 1..20: mol_type = other DNA
cttagatttttttctttatc

SEQ ID NO: 193 - DNA, 20 bp, synthetic construct
  source 1..20: mol_type = other DNA
ttccacatttttcattcatc

SEQ ID NO: 194 - DNA, 20 bp, synthetic construct
  source 1..20: mol_type = other DNA
agtactttcttatcccctta

SEQ ID NO: 195 - DNA, 20 bp, synthetic construct
  source 1..20: mol_type = other DNA
tctattatctctcttgcaca

SEQ ID NO: 196 - DNA, 20 bp, synthetic construct
  source 1..20: mol_type = other DNA
cttgcttgatttcttttgat

SEQ ID NO: 197 - DNA, 20 bp, synthetic construct
  source 1..20: mol_type = other DNA
actcagttttaccccttcaa

SEQ ID NO: 198 - DNA, 20 bp, synthetic construct
  source 1..20: mol_type = other DNA
actttttgcctctctcataa

SEQ ID NO: 199 - DNA, 20 bp, synthetic construct
  source 1..20: mol_type = other DNA
tgtctctgtttccccaacat

SEQ ID NO: 200 - DNA, 20 bp, synthetic construct
  source 1..20: mol_type = other DNA
attctattttcccttctcac

SEQ ID NO: 201 - DNA, 20 bp, synthetic construct
  source 1..20: mol_type = other DNA
atttctatcattactcccat

SEQ ID NO: 202 - DNA, 20 bp, synthetic construct
  source 1..20: mol_type = other DNA
gtgctttgttcatttcctat

SEQ ID NO: 203 - DNA, 20 bp, synthetic construct
  source 1..20: mol_type = other DNA
tacaacaattttatcttcat

SEQ ID NO: 204 - DNA, 20 bp, synthetic construct
  source 1..20: mol_type = other DNA
ctttcttctccattttcctt

SEQ ID NO: 205 - DNA, 20 bp, synthetic construct
  source 1..20: mol_type = other DNA
gctattttttttcaaagcct

SEQ ID NO: 206 - DNA, 20 bp, synthetic construct
  source 1..20: mol_type = other DNA
ttgttcatttataccacaca

SEQ ID NO: 207 - DNA, 20 bp, synthetic construct
  source 1..20: mol_type = other DNA
cctcttttgcattctagtgc

SEQ ID NO: 208 - DNA, 20 bp, synthetic construct
  source 1..20: mol_type = other DNA
ttcattctctcttatcacct

SEQ ID NO: 209 - DNA, 20 bp, synthetic construct
  source 1..20: mol_type = other DNA
cttctttttttaactgctga

SEQ ID NO: 210 - DNA, 20 bp, synthetic construct
  source 1..20: mol_type = other DNA
ctgtcattctctctcatttc

SEQ ID NO: 211 - DNA, 20 bp, synthetic construct
  source 1..20: mol_type = other DNA
ccatctgttctatccgcttt

SEQ ID NO: 212 - DNA, 20 bp, synthetic construct
  source 1..20: mol_type = other DNA
acacttctatatcttctgta

SEQ ID NO: 213 - DNA, 20 bp, synthetic construct
  source 1..20: mol_type = other DNA
gcttttttttgaatcttcct

SEQ ID NO: 214 - DNA, 20 bp, synthetic construct
  source 1..20: mol_type = other DNA
catcattcttatttattcat

SEQ ID NO: 215 - DNA, 20 bp, synthetic construct
  source 1..20: mol_type = other DNA
ttcctatttattcttccata

SEQ ID NO: 216 - DNA, 20 bp, synthetic construct
  source 1..20: mol_type = other DNA
gcatcagtttttcttctaaa

SEQ ID NO: 217 - DNA, 20 bp, synthetic construct
  source 1..20: mol_type = other DNA
atatattctctttttccctc

SEQ ID NO: 218 - DNA, 20 bp, synthetic construct
  source 1..20: mol_type = other DNA
agttgtttttttcatatccc

SEQ ID NO: 219 - DNA, 20 bp, synthetic construct
  source 1..20: mol_type = other DNA
acatttatttgatcccatat

SEQ ID NO: 220 - DNA, 20 bp, synthetic construct
  source 1..20: mol_type = other DNA
actctcattctcattttttc

SEQ ID NO: 221 - DNA, 20 bp, synthetic construct
  source 1..20: mol_type = other DNA
gctcaatttcacatcactga

SEQ ID NO: 222 - DNA, 20 bp, synthetic construct
  source 1..20: mol_type = other DNA
ccccacatttttctcctata

SEQ ID NO: 223 - DNA, 20 bp, synthetic construct
  source 1..20: mol_type = other DNA
cacttctttttctatttcta

SEQ ID NO: 224 - DNA, 20 bp, synthetic construct
  source 1..20: mol_type = other DNA
ctatccatattctctcacca

SEQ ID NO: 225 - DNA, 20 bp, synthetic construct
  source 1..20: mol_type = other DNA
tgtactgcttactctatccc

SEQ ID NO: 226 - DNA, 20 bp, synthetic construct
  source 1..20: mol_type = other DNA
gtgtattgccaaattgcccc

SEQ ID NO: 227 - DNA, 20 bp, synthetic construct
  source 1..20: mol_type = other DNA
actctgctttatcacattaa

SEQ ID NO: 228 - DNA, 20 bp, synthetic construct
  source 1..20: mol_type = other DNA
gtgtttcttcttttctccct

SEQ ID NO: 229 - DNA, 20 bp, synthetic construct
  source 1..20: mol_type = other DNA
gcttttgttctccccctccc

SEQ ID NO: 230 - DNA, 20 bp, synthetic construct
  source 1..20: mol_type = other DNA
ttgcattttcttcctccaat

SEQ ID NO: 231 - DNA, 20 bp, synthetic construct
  source 1..20: mol_type = other DNA
tgttccattccctttacctt

SEQ ID NO: 232 - DNA, 20 bp, synthetic construct
  source 1..20: mol_type = other DNA
ctgtggtttttttcttgtct

SEQ ID NO: 233 - DNA, 20 bp, synthetic construct
  source 1..20: mol_type = other DNA
gttcccactttccacaatct

SEQ ID NO: 234 - DNA, 20 bp, synthetic construct
  source 1..20: mol_type = other DNA
cttgttcacatttttaatca

SEQ ID NO: 235 - DNA, 20 bp, synthetic construct
  source 1..20: mol_type = other DNA
tcttaagctcatttatgcca

SEQ ID NO: 236 - DNA, 20 bp, synthetic construct
  source 1..20: mol_type = other DNA
gtacattttttcctttggac

SEQ ID NO: 237 - DNA, 20 bp, synthetic construct
  source 1..20: mol_type = other DNA
tatatttctaatatcacatt

SEQ ID NO: 238 - DNA, 20 bp, synthetic construct
  source 1..20: mol_type = other DNA
tcatttttttctcacctgca

SEQ ID NO: 239 - DNA, 20 bp, synthetic construct
  source 1..20: mol_type = other DNA
gcctcattagtactacattc

SEQ ID NO: 240 - DNA, 20 bp, synthetic construct
  source 1..20: mol_type = other DNA
cttgctttattacctgcata

SEQ ID NO: 241 - DNA, 20 bp, synthetic construct
  source 1..20: mol_type = other DNA
cttgtctttttcatctctct

SEQ ID NO: 242 - DNA, 20 bp, synthetic construct
  source 1..20: mol_type = other DNA
tttattccttgaattctact

SEQ ID NO: 243 - DNA, 20 bp, synthetic construct
  source 1..20: mol_type = other DNA
caagccccatgataccccta

SEQ ID NO: 244 - DNA, 20 bp, synthetic construct
  source 1..20: mol_type = other DNA
aaaagaggatcttaaaagct

SEQ ID NO: 245 - DNA, 20 bp, synthetic construct
  source 1..20: mol_type = other DNA
ccccaatctcatatcaggat

SEQ ID NO: 246 - DNA, 20 bp, synthetic construct
  source 1..20: mol_type = other DNA
atatccacatcatcaaaaat

SEQ ID NO: 247 - DNA, 20 bp, synthetic construct
  source 1..20: mol_type = other DNA
aatgggatatccacatcatc

SEQ ID NO: 248 - DNA, 20 bp, synthetic construct
  source 1..20: mol_type = other DNA
tacttgtcaatcactctttt

SEQ ID NO: 249 - DNA, 20 bp, synthetic construct
  source 1..20: mol_type = other DNA
acccattttcttccttcatc

SEQ ID NO: 250 - DNA, 20 bp, synthetic construct
  source 1..20: mol_type = other DNA
tccgatgttttatcctcata

SEQ ID NO: 251 - DNA, 20 bp, synthetic construct
  source 1..20: mol_type = other DNA
gctgatttctttttcatcaa

SEQ ID NO: 252 - DNA, 20 bp, synthetic construct
  source 1..20: mol_type = other DNA
actgtttaatttttttcatc

SEQ ID NO: 253 - DNA, 20 bp, synthetic construct
  source 1..20: mol_type = other DNA
acgcttttttttgaatcttc

SEQ ID NO: 254 - DNA, 20 bp, synthetic construct
  source 1..20: mol_type = other DNA
cccattttactctttcataa

SEQ ID NO: 255 - DNA, 20 bp, synthetic construct
  source 1..20: mol_type = other DNA
attcattttaaaatccccca

SEQ ID NO: 256 - DNA, 20 bp, synthetic construct
  source 1..20: mol_type = other DNA
cttgacattcatatccagta

SEQ ID NO: 257 - DNA, 20 bp, synthetic construct
  source 1..20: mol_type = other DNA
gctgatttctagctcgagct

SEQ ID NO: 258 - DNA, 20 bp, synthetic construct
  source 1..20: mol_type = other DNA
gtttagatttatcatttccc

SEQ ID NO: 259 - DNA, 20 bp, synthetic construct
  source 1..20: mol_type = other DNA
cttagcattttctcagcact

SEQ ID NO: 260 - DNA, 20 bp, synthetic construct
  source 1..20: mol_type = other DNA
tttcctatttattcttccat

SEQ ID NO: 261 - DNA, 20 bp, synthetic construct
  source 1..20: mol_type = other DNA
tctactacttccatcacact

SEQ ID NO: 262 - DNA, 20 bp, synthetic construct
  source 1..20: mol_type = other DNA
cctttttttcttccccactc

SEQ ID NO: 263 - DNA, 20 bp, synthetic construct
  source 1..20: mol_type = other DNA
atgttcattttattccctcc

SEQ ID NO: 264 - DNA, 20 bp, synthetic construct
  source 1..20: mol_type = other DNA
actattttctttttaaatca

SEQ ID NO: 265 - DNA, 20 bp, synthetic construct
  source 1..20: mol_type = other DNA
gttgcattttcttcctccaa

SEQ ID NO: 266 - DNA, 20 bp, synthetic construct
  source 1..20: mol_type = other DNA
gtgcagattctattttccct

SEQ ID NO: 267 - DNA, 20 bp, synthetic construct
  source 1..20: mol_type = other DNA
gcacacttctttttctattt

SEQ ID NO: 268 - DNA, 20 bp, synthetic construct
  source 1..20: mol_type = other DNA
tcactcttttctacgccctc

SEQ ID NO: 269 - DNA, 20 bp, synthetic construct
  source 1..20: mol_type = other DNA
tgacttatctacctaaactt

SEQ ID NO: 270 - DNA, 20 bp, synthetic construct
  source 1..20: mol_type = other DNA
gctcactttctcctctgtct

SEQ ID NO: 271 - DNA, 20 bp, synthetic construct
  source 1..20: mol_type = other DNA
ttcgatcttcttatcacctt

SEQ ID NO: 272 - DNA, 20 bp, synthetic construct
  source 1..20: mol_type = other DNA
acttgccttttctttttctc

SEQ ID NO: 273 - DNA, 20 bp, synthetic construct
  source 1..20: mol_type = other DNA
ctggaatatttcattatcaa

SEQ ID NO: 274 - DNA, 20 bp, synthetic construct
  source 1..20: mol_type = other DNA
actttgtactgcttactcta

SEQ ID NO: 275 - DNA, 20 bp, synthetic construct
  source 1..20: mol_type = other DNA
gttgttcatttataccacac

SEQ ID NO: 276 - DNA, 20 bp, synthetic construct
  source 1..20: mol_type = other DNA
tcttgttcacatttttaatc

SEQ ID NO: 277 - DNA, 20 bp, synthetic construct
  source 1..20: mol_type = other DNA
attaatgttcccactttcca

SEQ ID NO: 278 - DNA, 20 bp, synthetic construct
  source 1..20: mol_type = other DNA
ctatctttcttctccatttt

SEQ ID NO: 279 - DNA, 20 bp, synthetic construct
  source 1..20: mol_type = other DNA
aatacataatacttttcaca

SEQ ID NO: 280 - DNA, 20 bp, synthetic construct
  source 1..20: mol_type = other DNA
agtattgttttttctaatcc

SEQ ID NO: 281 - DNA, 20 bp, synthetic construct
  source 1..20: mol_type = other DNA
acacatttatttgatcccat

SEQ ID NO: 282 - DNA, 20 bp, synthetic construct
  source 1..20: mol_type = other DNA
tatatattctctttttccct

SEQ ID NO: 283 - DNA, 20 bp, synthetic construct
  source 1..20: mol_type = other DNA
actgctttatattctctcta

SEQ ID NO: 284 - DNA, 20 bp, synthetic construct
  source 1..20: mol_type = other DNA
tgtgtttcttcttttctccc

SEQ ID NO: 285 - DNA, 20 bp, synthetic construct
  source 1..20: mol_type = other DNA
ttgcatttcttttctaccag

SEQ ID NO: 286 - DNA, 20 bp, synthetic construct
  source 1..20: mol_type = other DNA
gcattgtttctcattgcttt

SEQ ID NO: 287 - DNA, 20 bp, synthetic construct
  source 1..20: mol_type = other DNA
actaccagtatcctccattc

SEQ ID NO: 288 - DNA, 20 bp, synthetic construct
  source 1..20: mol_type = other DNA
gcttgtttattccttgaatt

SEQ ID NO: 289 - DNA, 20 bp, synthetic construct
  source 1..20: mol_type = other DNA
acgcagatttccattgagct

SEQ ID NO: 290 - DNA, 20 bp, synthetic construct
  source 1..20: mol_type = other DNA
ctgctttatcatcttcataa

SEQ ID NO: 291 - DNA, 20 bp, synthetic construct
  source 1..20: mol_type = other DNA
acacatttcacattcaggtt

SEQ ID NO: 292 - DNA, 20 bp, synthetic construct
  source 1..20: mol_type = other DNA
tgtggtttctttctcttctt

SEQ ID NO: 293 - DNA, 20 bp, synthetic construct
  source 1..20: mol_type = other DNA
acatcattcttatttattca

SEQ ID NO: 294 - DNA, 20 bp, synthetic construct
  source 1..20: mol_type = other DNA
gatcatgtatctttacactc

SEQ ID NO: 295 - DNA, 20 bp, synthetic construct
  source 1..20: mol_type = other DNA
gccttttgccatcaccacac

SEQ ID NO: 296 - DNA, 20 bp, synthetic construct
  source 1..20: mol_type = other DNA
attctttttctaattcgaat

SEQ ID NO: 297 - DNA, 20 bp, synthetic construct
  source 1..20: mol_type = other DNA
tctgcttttctcattgactt

SEQ ID NO: 298 - DNA, 20 bp, synthetic construct
  source 1..20: mol_type = other DNA
tcatctttttcataggcatc

SEQ ID NO: 299 - DNA, 20 bp, synthetic construct
  source 1..20: mol_type = other DNA
tttcattctctcttatcacc

SEQ ID NO: 300 - DNA, 20 bp, synthetic construct
  source 1..20: mol_type = other DNA
ctacttgtctctttctcact

SEQ ID NO: 301 - DNA, 20 bp, synthetic construct
  source 1..20: mol_type = other DNA
gtatatttctaatatcacat

SEQ ID NO: 302 - DNA, 20 bp, synthetic construct
  source 1..20: mol_type = other DNA
ttttccttctttttcaacct

SEQ ID NO: 303 - DNA, 20 bp, synthetic construct
  source 1..20: mol_type = other DNA
atgcatgactttctcgctat

SEQ ID NO: 304 - DNA, 20 bp, synthetic construct
  source 1..20: mol_type = other DNA
ctgatttttttcttcttgct

SEQ ID NO: 305 - DNA, 20 bp, synthetic construct
  source 1..20: mol_type = other DNA
ccatcatccatataccactc

SEQ ID NO: 306 - DNA, 20 bp, synthetic construct
  source 1..20: mol_type = other DNA
atgcttgtctctccctttca

SEQ ID NO: 307 - DNA, 20 bp, synthetic construct
  source 1..20: mol_type = other DNA
ttgtctttattccttcctgc

SEQ ID NO: 308 - DNA, 20 bp, synthetic construct
  source 1..20: mol_type = other DNA
gcttcatacttccttatttt

SEQ ID NO: 309 - DNA, 20 bp, synthetic construct
  source 1..20: mol_type = other DNA
aatgcattttctctccccat

SEQ ID NO: 310 - DNA, 20 bp, synthetic construct
  source 1..20: mol_type = other DNA
cagtcttttcatattgcttc

SEQ ID NO: 311 - DNA, 20 bp, synthetic construct
  source 1..20: mol_type = other DNA
actgcttaatgagacatact

SEQ ID NO: 312 - DNA, 20 bp, synthetic construct
  source 1..20: mol_type = other DNA
ctgcttctttttttaactgc

SEQ ID NO: 313 - DNA, 20 bp, synthetic construct
  source 1..20: mol_type = other DNA
gtcatttttttctcacctgc

SEQ ID NO: 314 - DNA, 20 bp, synthetic construct
  source 1..20: mol_type = other DNA
cttccatttctctcatgcat

SEQ ID NO: 315 - DNA, 20 bp, synthetic construct
  source 1..20: mol_type = other DNA
gttattgtttaataccatca

SEQ ID NO: 316 - DNA, 20 bp, synthetic construct
  source 1..20: mol_type = other DNA
gctagcctattttcctttct

SEQ ID NO: 317 - DNA, 20 bp, synthetic construct
  source 1..20: mol_type = other DNA
cttatttttctccatatcac

SEQ ID NO: 318 - DNA, 20 bp, synthetic construct
  source 1..20: mol_type = other DNA
tctcttcatttcaacacatt

SEQ ID NO: 319 - DNA, 20 bp, synthetic construct
  source 1..20: mol_type = other DNA
atttctttcaacatttccca

SEQ ID NO: 320 - DNA, 20 bp, synthetic construct
  source 1..20: mol_type = other DNA
tcttgtctttttcatctctc

SEQ ID NO: 321 - DNA, 20 bp, synthetic construct
  source 1..20: mol_type = other DNA
taatgggatatccacatcat

SEQ ID NO: 322 - DNA, 20 bp, synthetic construct
  source 1..20: mol_type = other DNA
accccaatctcatatcagga

SEQ ID NO: 323 - DNA, 20 bp, synthetic construct
  source 1..20: mol_type = other DNA
ctacttgtcaatcactcttt

SEQ ID NO: 324 - DNA, 20 bp, synthetic construct
  source 1..20: mol_type = other DNA
gatatccacatcatcaaaaa

SEQ ID NO: 325 - DNA, 20 bp, synthetic construct
  source 1..20: mol_type = other DNA
tcaagccccatgatacccct

SEQ ID NO: 326 - DNA, 20 bp, synthetic construct
  source 1..20: mol_type = other DNA
agatagctaaaaaagaggat

SEQ ID NO: 327 - DNA, 20 bp, synthetic construct
  source 1..20: mol_type = other DNA
gtgtcatttttttctcacct

SEQ ID NO: 328 - DNA, 20 bp, synthetic construct
  source 1..20: mol_type = other DNA
gtgcatctcctattcatccc

SEQ ID NO: 329 - DNA, 20 bp, synthetic construct
  source 1..20: mol_type = other DNA
gtctgttttatctatccact

SEQ ID NO: 330 - DNA, 20 bp, synthetic construct
  source 1..20: mol_type = other DNA
ctgtgtttcttcttttctcc

SEQ ID NO: 331 - DNA, 20 bp, synthetic construct
  source 1..20: mol_type = other DNA
atatacactttgtactgctt

SEQ ID NO: 332 - DNA, 20 bp, synthetic construct
  source 1..20: mol_type = other DNA
attgcatttcttttctacca

SEQ ID NO: 333 - DNA, 20 bp, synthetic construct
  source 1..20: mol_type = other DNA
agttgcattttcttcctcca

SEQ ID NO: 334 - DNA, 20 bp, synthetic construct
  source 1..20: mol_type = other DNA
ttttagtattttcttgttca

SEQ ID NO: 335 - DNA, 20 bp, synthetic construct
  source 1..20: mol_type = other DNA
ctgtcatattttatttcatt

SEQ ID NO: 336 - DNA, 20 bp, synthetic construct
  source 1..20: mol_type = other DNA
actatctttcttctccattt

SEQ ID NO: 337 - DNA, 20 bp, synthetic construct
  source 1..20: mol_type = other DNA
acttggacttttatccttta

SEQ ID NO: 338 - DNA, 20 bp, synthetic construct
  source 1..20: mol_type = other DNA
accaattatttaattatact

SEQ ID NO: 339 - DNA, 20 bp, synthetic construct
  source 1..20: mol_type = other DNA
attttccttctttttcaacc

SEQ ID NO: 340 - DNA, 20 bp, synthetic construct
  source 1..20: mol_type = other DNA
ctctcactttctattgctga

SEQ ID NO: 341 - DNA, 20 bp, synthetic construct
  source 1..20: mol_type = other DNA
gcactcatttttgtaaactc

SEQ ID NO: 342 - DNA, 20 bp, synthetic construct
  source 1..20: mol_type = other DNA
gtgtatctatatctccctac

SEQ ID NO: 343 - DNA, 20 bp, synthetic construct
  source 1..20: mol_type = other DNA
tctctgtttttcctaccata

SEQ ID NO: 344 - DNA, 20 bp, synthetic construct
  source 1..20: mol_type = other DNA
gcttttctcaattttccaaa

SEQ ID NO: 345 - DNA, 20 bp, synthetic construct
  source 1..20: mol_type = other DNA
ttttagtgattatttttcca

SEQ ID NO: 346 - DNA, 20 bp, synthetic construct
  source 1..20: mol_type = other DNA
tgtcttgacattcatatcca

SEQ ID NO: 347 - DNA, 20 bp, synthetic construct
  source 1..20: mol_type = other DNA
gcactattatcaatcccatc

SEQ ID NO: 348 - DNA, 20 bp, synthetic construct
  source 1..20: mol_type = other DNA
cctacgcttttttttgaatc

SEQ ID NO: 349 - DNA, 20 bp, synthetic construct
  source 1..20: mol_type = other DNA
gtcattttgcattactttta

SEQ ID NO: 350 - DNA, 20 bp, synthetic construct
  source 1..20: mol_type = other DNA
cctcatttctaatatatctc

SEQ ID NO: 351 - DNA, 20 bp, synthetic construct
  source 1..20: mol_type = other DNA
gtgccttttttcccttccat

SEQ ID NO: 352 - DNA, 20 bp, synthetic construct
  source 1..20: mol_type = other DNA
ccccattttactctttcata

SEQ ID NO: 353 - DNA, 20 bp, synthetic construct
  source 1..20: mol_type = other DNA
tgtatatttctaatatcaca

SEQ ID NO: 354 - DNA, 20 bp, synthetic construct
  source 1..20: mol_type = other DNA
gtgtctttaatttaaacata

SEQ ID NO: 355 - DNA, 20 bp, synthetic construct
  source 1..20: mol_type = other DNA
cctattttacacaccatcct

SEQ ID NO: 356 - DNA, 20 bp, synthetic construct
  source 1..20: mol_type = other DNA
cttgtatttctttcaacatt

SEQ ID NO: 357 - DNA, 20 bp, synthetic construct
  source 1..20: mol_type = other DNA
cttattatccaatctacaca

SEQ ID NO: 358 - DNA, 20 bp, synthetic construct
  source 1..20: mol_type = other DNA
ctttgttgcgaccttccttc

SEQ ID NO: 359 - DNA, 20 bp, synthetic construct
  source 1..20: mol_type = other DNA
tcttcatataatcagcaaca

SEQ ID NO: 360 - DNA, 20 bp, synthetic construct
  source 1..20: mol_type = other DNA
ccttatttttctccatatca

SEQ ID NO: 361 - DNA, 20 bp, synthetic construct
  source 1..20: mol_type = other DNA
gtgtggtttctttctcttct

SEQ ID NO: 362 - DNA, 20 bp, synthetic construct
  source 1..20: mol_type = other DNA
gctgctttatcatcttcata

SEQ ID NO: 363 - DNA, 20 bp, synthetic construct
  source 1..20: mol_type = other DNA
gacccattttcttccttcat

SEQ ID NO: 364 - DNA, 20 bp, synthetic construct
  source 1..20: mol_type = other DNA
atgtatgcttcatacttcct

SEQ ID NO: 365 - DNA, 20 bp, synthetic construct
  source 1..20: mol_type = other DNA
ttcactcttttctacgccct

SEQ ID NO: 366 - DNA, 20 bp, synthetic construct
  source 1..20: mol_type = other DNA
actgatttttttcttcttgc

SEQ ID NO: 367 - DNA, 20 bp, synthetic construct
  source 1..20: mol_type = other DNA
gtttttttcatatccctaat

SEQ ID NO: 368 - DNA, 20 bp, synthetic construct
  source 1..20: mol_type = other DNA
atgattttattatttgagtt

SEQ ID NO: 369 - DNA, 20 bp, synthetic construct
  source 1..20: mol_type = other DNA
ttccgatgttttatcctcat

SEQ ID NO: 370 - DNA, 20 bp, synthetic construct
  source 1..20: mol_type = other DNA
ctttctttccatttcagaaa

SEQ ID NO: 371 - DNA, 20 bp, synthetic construct
  source 1..20: mol_type = other DNA
gtcacttttccatactaata

SEQ ID NO: 372 - DNA, 20 bp, synthetic construct
  source 1..20: mol_type = other DNA
gcctttttttcttccccact

SEQ ID NO: 373 - DNA, 20 bp, synthetic construct
  source 1..20: mol_type = other DNA
atttcattctctcttatcac

SEQ ID NO: 374 - DNA, 20 bp, synthetic construct
  source 1..20: mol_type = other DNA
gcctattgcaactaatacct

SEQ ID NO: 375 - DNA, 20 bp, synthetic construct
  source 1..20: mol_type = other DNA
ctttcttattatttagtata

SEQ ID NO: 376 - DNA, 20 bp, synthetic construct
  source 1..20: mol_type = other DNA
agtactttctactacttcca

SEQ ID NO: 377 - DNA, 20 bp, synthetic construct
  source 1..20: mol_type = other DNA
ctgacttatctacctaaact

SEQ ID NO: 378 - DNA, 20 bp, synthetic construct
  source 1..20: mol_type = other DNA
ttgtgggttattctttacca

SEQ ID NO: 379 - DNA, 20 bp, synthetic construct
  source 1..20: mol_type = other DNA
gcacatcattcttatttatt

SEQ ID NO: 380 - DNA, 20 bp, synthetic construct
  source 1..20: mol_type = other DNA
gcttttttctctgctactca

SEQ ID NO: 381 - DNA, 20 bp, synthetic construct
  source 1..20: mol_type = other DNA
ggctcactttctcctctgtc

SEQ ID NO: 382 - DNA, 20 bp, synthetic construct
  source 1..20: mol_type = other DNA
ctctcattttacatttttaa

SEQ ID NO: 383 - DNA, 20 bp, synthetic construct
  source 1..20: mol_type = other DNA
gctacattttctcagatctc

SEQ ID NO: 384 - DNA, 20 bp, synthetic construct
  source 1..20: mol_type = other DNA
tgtttttttcctcttcattt

SEQ ID NO: 385 - DNA, 20 bp, synthetic construct
  source 1..20: mol_type = other DNA
tcttccatttctctcatgca

SEQ ID NO: 386 - DNA, 20 bp, synthetic construct
  source 1..20: mol_type = other DNA
tagtctcttcatttcaacac

SEQ ID NO: 387 - DNA, 20 bp, synthetic construct
  source 1..20: mol_type = other DNA
atgcattttcattcacaaat

SEQ ID NO: 388 - DNA, 20 bp, synthetic construct
  source 1..20: mol_type = other DNA
ctgtccattcttctcactta

SEQ ID NO: 389 - DNA, 20 bp, synthetic construct
  source 1..20: mol_type = other DNA
aacacttaatacataatact

SEQ ID NO: 390 - DNA, 20 bp, synthetic construct
  source 1..20: mol_type = other DNA
atatatattctctttttccc

SEQ ID NO: 391 - DNA, 20 bp, synthetic construct
  source 1..20: mol_type = other DNA
atttcttgtctttttcatct

SEQ ID NO: 392 - DNA, 20 bp, synthetic construct
  source 1..20: mol_type = other DNA
acttttctcttcctataaaa

SEQ ID NO: 393 - DNA, 20 bp, synthetic construct
  source 1..20: mol_type = other DNA
ctttgtcttcacttctcaaa

SEQ ID NO: 394 - DNA, 20 bp, synthetic construct
  source 1..20: mol_type = other DNA
ggttatttttttctttctaa

SEQ ID NO: 395 - DNA, 20 bp, synthetic construct
  source 1..20: mol_type = other DNA
gctcattcatttgctgtctc

SEQ ID NO: 396 - DNA, 20 bp, synthetic construct
  source 1..20: mol_type = other DNA
atttcctatttattcttcca

SEQ ID NO: 397 - DNA, 20 bp, synthetic construct
  source 1..20: mol_type = other DNA
actagtttttttctcctcaa

SEQ ID NO: 398 - DNA, 20 bp, synthetic construct
  source 1..20: mol_type = other DNA
cttgtagcttttcaccagac

SEQ ID NO: 399 - DNA, 20 bp, synthetic construct
  source 1..20: mol_type = other DNA
ctgattttgatcctcactat

SEQ ID NO: 400 - DNA, 20 bp, synthetic construct
  source 1..20: mol_type = other DNA
ttcaagccccatgatacccc

SEQ ID NO: 401 - DNA, 20 bp, synthetic construct
  source 1..20: mol_type = other DNA
ctctacttgtcaatcactct

SEQ ID NO: 402 - DNA, 20 bp, synthetic construct
  source 1..20: mol_type = other DNA
taaaccccaatctcatatca

SEQ ID NO: 403 - DNA, 20 bp, synthetic construct
  source 1..20: mol_type = other DNA
tcaggattacatatttaagt

SEQ ID NO: 404 - DNA, 20 bp, synthetic construct
  source 1..20: mol_type = other DNA
ggatatccacatcatcaaaa

SEQ ID NO: 405 - DNA, 20 bp, synthetic construct
  source 1..20: mol_type = other DNA
aattgcatttcttttctacc

SEQ ID NO: 406 - DNA, 20 bp, synthetic construct
  source 1..20: mol_type = other DNA
cacattttacatttaacaca

SEQ ID NO: 407 - DNA, 20 bp, synthetic construct
  source 1..20: mol_type = other DNA
tgtttttttcatatccctaa

SEQ ID NO: 408 - DNA, 20 bp, synthetic construct
  source 1..20: mol_type = other DNA
ctcattttccatctatgaaa

SEQ ID NO: 409 - DNA, 20 bp, synthetic construct
  source 1..20: mol_type = other DNA
gcatctttcacctctattgt

SEQ ID NO: 410 - DNA, 20 bp, synthetic construct
  source 1..20: mol_type = other DNA
agtctgttttatctatccac

SEQ ID NO: 411 - DNA, 20 bp, synthetic construct
  source 1..20: mol_type = other DNA
gttgattttctattctaatc

SEQ ID NO: 412 - DNA, 20 bp, synthetic construct
  source 1..20: mol_type = other DNA
gtgagtattctccaagtact

SEQ ID NO: 413 - DNA, 20 bp, synthetic construct
  source 1..20: mol_type = other DNA
gttcattttacattttttat

SEQ ID NO: 414 - DNA, 20 bp, synthetic construct
  source 1..20: mol_type = other DNA
gctttgtcttcacttctcaa

SEQ ID NO: 415 - DNA, 20 bp, synthetic construct
  source 1..20: mol_type = other DNA
cttctcattttatttgggaa

SEQ ID NO: 416 - DNA, 20 bp, synthetic construct
  source 1..20: mol_type = other DNA
tccattttccttctttttca

SEQ ID NO: 417 - DNA, 20 bp, synthetic construct
  source 1..20: mol_type = other DNA
acttgtatttctttcaacat

SEQ ID NO: 418 - DNA, 20 bp, synthetic construct
  source 1..20: mol_type = other DNA
cttcagtttttaacctctcc

SEQ ID NO: 419 - DNA, 20 bp, synthetic construct
  source 1..20: mol_type = other DNA
tcatcaggctcattcccctc

SEQ ID NO: 420 - DNA, 20 bp, synthetic construct
  source 1..20: mol_type = other DNA
gcttcattctgaatttaatc

SEQ ID NO: 421 - DNA, 20 bp, synthetic construct
  source 1..20: mol_type = other DNA
acatatttctttagtttatt

SEQ ID NO: 422 - DNA, 20 bp, synthetic construct
  source 1..20: mol_type = other DNA
ttgtttttttcctcttcatt

SEQ ID NO: 423 - DNA, 20 bp, synthetic construct
  source 1..20: mol_type = other DNA
gcatctgttttttaatgatt

SEQ ID NO: 424 - DNA, 20 bp, synthetic construct
  source 1..20: mol_type = other DNA
ttgtatatttctaatatcac

SEQ ID NO: 425 - DNA, 20 bp, synthetic construct
  source 1..20: mol_type = other DNA
ctgtcacttttccatactaa

SEQ ID NO: 426 - DNA, 20 bp, synthetic construct
  source 1..20: mol_type = other DNA
agctgctttatcatcttcat

SEQ ID NO: 427 - DNA, 20 bp, synthetic construct
  source 1..20: mol_type = other DNA
gcattttttcctataatctt

SEQ ID NO: 428 - DNA, 20 bp, synthetic construct
  source 1..20: mol_type = other DNA
ctttctcttcttcctggaga

SEQ ID NO: 429 - DNA, 20 bp, synthetic construct
  source 1..20: mol_type = other DNA
gcttttttaaatgtaatcct

SEQ ID NO: 430 - DNA, 20 bp, synthetic construct
  source 1..20: mol_type = other DNA
cgcacataattcttcatctt

SEQ ID NO: 431 - DNA, 20 bp, synthetic construct
  source 1..20: mol_type = other DNA
tgttctcccctacctaaccc

SEQ ID NO: 432 - DNA, 20 bp, synthetic construct
  source 1..20: mol_type = other DNA
actattttcatcacatcact

SEQ ID NO: 433 - DNA, 20 bp, synthetic construct
  source 1..20: mol_type = other DNA
actcttgatttcctaatcta

SEQ ID NO: 434 - DNA, 20 bp, synthetic construct
  source 1..20: mol_type = other DNA
tctcattattgattatgcca

SEQ ID NO: 435 - DNA, 20 bp, synthetic construct
  source 1..20: mol_type = other DNA
cattcttactgatttttttc

SEQ ID NO: 436 - DNA, 20 bp, synthetic construct
  source 1..20: mol_type = other DNA
ctggatatactaaccacccc

SEQ ID NO: 437 - DNA, 20 bp, synthetic construct
  source 1..20: mol_type = other DNA
gcatatgtatatatcataat

SEQ ID NO: 438 - DNA, 20 bp, synthetic construct
  source 1..20: mol_type = other DNA
ttgcctttttttcttcccca

SEQ ID NO: 439 - DNA, 20 bp, synthetic construct
  source 1..20: mol_type = other DNA
ctactatctttcttctccat

SEQ ID NO: 440 - DNA, 20 bp, synthetic construct
  source 1..20: mol_type = other DNA
actgtgtttcttcttttctc

SEQ ID NO: 441 - DNA, 20 bp, synthetic construct
  source 1..20: mol_type = other DNA
cctctttttcctcttttcca

SEQ ID NO: 442 - DNA, 20 bp, synthetic construct
  source 1..20: mol_type = other DNA
cctcatgtccactatccttc

SEQ ID NO: 443 - DNA, 20 bp, synthetic construct
  source 1..20: mol_type = other DNA
tctttttccatttgtccgct

SEQ ID NO: 444 - DNA, 20 bp, synthetic construct
  source 1..20: mol_type = other DNA
cctagcatttctctttttca

SEQ ID NO: 445 - DNA, 20 bp, synthetic construct
  source 1..20: mol_type = other DNA
ttcacatttttaatcaaaaa

SEQ ID NO: 446 - DNA, 20 bp, synthetic construct
  source 1..20: mol_type = other DNA
gctttctttccatttcagaa

SEQ ID NO: 447 - DNA, 20 bp, synthetic construct
  source 1..20: mol_type = other DNA
gctgctgtttctatttttat

SEQ ID NO: 448 - DNA, 20 bp, synthetic construct
  source 1..20: mol_type = other DNA
gtcacacttcaacaccaact

SEQ ID NO: 449 - DNA, 20 bp, synthetic construct
  source 1..20: mol_type = other DNA
tttgatctatttctgacctt

SEQ ID NO: 450 - DNA, 20 bp, synthetic construct
  source 1..20: mol_type = other DNA
tctgattttgatcctcacta

SEQ ID NO: 451 - DNA, 20 bp, synthetic construct
  source 1..20: mol_type = other DNA
gcttttactctactgtgttc

SEQ ID NO: 452 - DNA, 20 bp, synthetic construct
  source 1..20: mol_type = other DNA
attctctttttccctccctt

SEQ ID NO: 453 - DNA, 20 bp, synthetic construct
  source 1..20: mol_type = other DNA
tcatcagttttccctaatga

SEQ ID NO: 454 - DNA, 20 bp, synthetic construct
  source 1..20: mol_type = other DNA
gctaagattttcttccattt

SEQ ID NO: 455 - DNA, 20 bp, synthetic construct
  source 1..20: mol_type = other DNA
cgtgcatctcctattcatcc

SEQ ID NO: 456 - DNA, 20 bp, synthetic construct
  source 1..20: mol_type = other DNA
ttgtgtatctatatctccct

SEQ ID NO: 457 - DNA, 20 bp, synthetic construct
  source 1..20: mol_type = other DNA
cttcactcttttctacgccc

SEQ ID NO: 458 - DNA, 20 bp, synthetic construct
  source 1..20: mol_type = other DNA
gcttctttctttactttgaa

SEQ ID NO: 459 - DNA, 20 bp, synthetic construct
  source 1..20: mol_type = other DNA
gctgtcatattttatttcat

SEQ ID NO: 460 - DNA, 20 bp, synthetic construct
  source 1..20: mol_type = other DNA
tgtgtcatttttttctcacc

SEQ ID NO: 461 - DNA, 20 bp, synthetic construct
  source 1..20: mol_type = other DNA
actattttatcataaatact

SEQ ID NO: 462 - DNA, 20 bp, synthetic construct
  source 1..20: mol_type = other DNA
gtcacagaatgataatcacc

SEQ ID NO: 463 - DNA, 20 bp, synthetic construct
  source 1..20: mol_type = other DNA
tatcttatttcattctctct

SEQ ID NO: 464 - DNA, 20 bp, synthetic construct
  source 1..20: mol_type = other DNA
ctctctgtttttcctaccat

SEQ ID NO: 465 - DNA, 20 bp, synthetic construct
  source 1..20: mol_type = other DNA
atgcttttctcaattttcca

SEQ ID NO: 466 - DNA, 20 bp, synthetic construct
  source 1..20: mol_type = other DNA
attagcatttattactctat

SEQ ID NO: 467 - DNA, 20 bp, synthetic construct
  source 1..20: mol_type = other DNA
gccttatttttctccatatc

SEQ ID NO: 468 - DNA, 20 bp, synthetic construct
  source 1..20: mol_type = other DNA
tttcatgtatatataaacca

SEQ ID NO: 469 - DNA, 20 bp, synthetic construct
  source 1..20: mol_type = other DNA
tttattttcattatttccac

SEQ ID NO: 470 - DNA, 20 bp, synthetic construct
  source 1..20: mol_type = other DNA
aggctcactttctcctctgt

SEQ ID NO: 471 - DNA, 20 bp, synthetic construct
  source 1..20: mol_type = other DNA
ctggtatttttctttgtgct

SEQ ID NO: 472 - DNA, 20 bp, synthetic construct
  source 1..20: mol_type = other DNA
cttgtttgattttcatccta

SEQ ID NO: 473 - DNA, 20 bp, synthetic construct
  source 1..20: mol_type = other DNA
tttatcttcatataatcagc

SEQ ID NO: 474 - DNA, 20 bp, synthetic construct
  source 1..20: mol_type = other DNA
gccactttatatatgaaata

SEQ ID NO: 475 - DNA, 20 bp, synthetic construct
  source 1..20: mol_type = other DNA
ccactgtgttctctccccta

SEQ ID NO: 476 - DNA, 20 bp, synthetic construct
  source 1..20: mol_type = other DNA
agtcactttcttattattta

SEQ ID NO: 477 - DNA, 20 bp, synthetic construct
  source 1..20: mol_type = other DNA
tcaatcactctttttagaga

SEQ ID NO: 478 - DNA, 20 bp, synthetic construct
  source 1..20: mol_type = other DNA
gggatatccacatcatcaaa

SEQ ID NO: 479 - DNA, 20 bp, synthetic construct
  source 1..20: mol_type = other DNA
aattcaagccccatgatacc

SEQ ID NO: 480 - DNA, 20 bp, synthetic construct
  source 1..20: mol_type = other DNA
ccccatgatacccctaatca

SEQ ID NO: 481 - DNA, 20 bp, synthetic construct
  source 1..20: mol_type = other DNA
ataaaccccaatctcatatc

SEQ ID NO: 482 - DNA, 20 bp, synthetic construct
  source 1..20: mol_type = other DNA
atatcaggattacatattta

SEQ ID NO: 483 - DNA, 16 bp, synthetic construct
  source 1..16: mol_type = other DNA
gactatactaagctgc

SEQ ID NO: 484 - DNA, 16 bp, synthetic construct
  source 1..16: mol_type = other DNA
agatatttacacgcag

SEQ ID NO: 485 - DNA, 16 bp, synthetic construct
  source 1..16: mol_type = other DNA
cgaacaaataaggtca

SEQ ID NO: 486 - DNA, 16 bp, synthetic construct
  source 1..16: mol_type = other DNA
taggtattatgcttca

SEQ ID NO: 487 - DNA, 16 bp, synthetic construct
  source 1..16: mol_type = other DNA
ggatataaaggtaggt

SEQ ID NO: 488 - DNA, 16 bp, synthetic construct
  source 1..16: mol_type = other DNA
ataactaattgcctgc

SEQ ID NO: 489 - DNA, 16 bp, synthetic construct
  source 1..16: mol_type = other DNA
tagtatttgagattcg

SEQ ID NO: 490 - DNA, 16 bp, synthetic construct
  source 1..16: mol_type = other DNA
agattaacaaccctgt

SEQ ID NO: 491 - DNA, 16 bp, synthetic construct
  source 1..16: mol_type = other DNA
ccatatgtagtatgtg

SEQ ID NO: 492 - DNA, 16 bp, synthetic construct
  source 1..16: mol_type = other DNA
gtcaatacggttcttt

SEQ ID NO: 493 - DNA, 16 bp, synthetic construct
  source 1..16: mol_type = other DNA
gaatttgaagctccgt

SEQ ID NO: 494 - DNA, 16 bp, synthetic construct
  source 1..16: mol_type = other DNA
ctgaataagggtatcc

SEQ ID NO: 495 - DNA, 16 bp, synthetic construct
  source 1..16: mol_type = other DNA
gagcaattagagtcat

SEQ ID NO: 496 - DNA, 16 bp, synthetic construct
  source 1..16: mol_type = other DNA
gactaaggtagatctc

SEQ ID NO: 497 - DNA, 16 bp, synthetic construct
  source 1..16: mol_type = other DNA
attgtataggacttgt

SEQ ID NO: 498 - DNA, 16 bp, synthetic construct
  source 1..16: mol_type = other DNA
gatatactaaccaccc

SEQ ID NO: 499 - DNA, 16 bp, synthetic construct
  source 1..16: mol_type = other DNA
tgaataagggtatcca

SEQ ID NO: 500 - DNA, 16 bp, synthetic construct
  source 1..16: mol_type = other DNA
gcagaataccatcagt

SEQ ID NO: 501 - DNA, 16 bp, synthetic construct
  source 1..16: mol_type = other DNA
gaaataatatcagccg

SEQ ID NO: 502 - DNA, 16 bp, synthetic construct
  source 1..16: mol_type = other DNA
tcttactagtaggtga

SEQ ID NO: 503 - DNA, 16 bp, synthetic construct
  source 1..16: mol_type = other DNA
gaatttttacgctgat

SEQ ID NO: 504 - DNA, 16 bp, synthetic construct
  source 1..16: mol_type = other DNA
actaataggcatccca

SEQ ID NO: 505 - DNA, 16 bp, synthetic construct
  source 1..16: mol_type = other DNA
gacaattaatgttccc

SEQ ID NO: 506 - DNA, 16 bp, synthetic construct
  source 1..16: mol_type = other DNA
gtcaataagggtctta

SEQ ID NO: 507 - DNA, 16 bp, synthetic construct
  source 1..16: mol_type = other DNA
gtagataagaactgcc

SEQ ID NO: 508 - DNA, 16 bp, synthetic construct
  source 1..16: mol_type = other DNA
gacgaatgaacatcac

SEQ ID NO: 509 - DNA, 16 bp, synthetic construct
  source 1..16: mol_type = other DNA
ccaaatagggttcgat

SEQ ID NO: 510 - DNA, 16 bp, synthetic construct
  source 1..16: mol_type = other DNA
atccgtaaaacattca

SEQ ID NO: 511 - DNA, 16 bp, synthetic construct
  source 1..16: mol_type = other DNA
tactatacatgagtcc

SEQ ID NO: 512 - DNA, 16 bp, synthetic construct
  source 1..16: mol_type = other DNA
gaatatgctgccctca

SEQ ID NO: 513 - DNA, 16 bp, synthetic construct
  source 1..16: mol_type = other DNA
ttaattatactagtcg

SEQ ID NO: 514 - DNA, 16 bp, synthetic construct
  source 1..16: mol_type = other DNA
gcattacaatccccag

SEQ ID NO: 515 - DNA, 16 bp, synthetic construct
  source 1..16: mol_type = other DNA
ctaatcatgattggga

SEQ ID NO: 516 - DNA, 16 bp, synthetic construct
  source 1..16: mol_type = other DNA
cccatataagatctcc

SEQ ID NO: 517 - DNA, 16 bp, synthetic construct
  source 1..16: mol_type = other DNA
atcttactagtaggtg

SEQ ID NO: 518 - DNA, 16 bp, synthetic construct
  source 1..16: mol_type = other DNA
gtagaataggccatac

SEQ ID NO: 519 - DNA, 16 bp, synthetic construct
  source 1..16: mol_type = other DNA
gcagaataaccactgg

SEQ ID NO: 520 - DNA, 16 bp, synthetic construct
  source 1..16: mol_type = other DNA
tctcatatcaggatta

SEQ ID NO: 521 - DNA, 16 bp, synthetic construct
  source 1..16: mol_type = other DNA
cataatatcaggatgg

SEQ ID NO: 522 - DNA, 16 bp, synthetic construct
  source 1..16: mol_type = other DNA
ctcatatcaggattac

SEQ ID NO: 523 - DNA, 16 bp, synthetic construct
  source 1..16: mol_type = other DNA
ccaaatcaaaacccgt

SEQ ID NO: 524 - DNA, 16 bp, synthetic construct
  source 1..16: mol_type = other DNA
gataattaccagtcta

SEQ ID NO: 525 - DNA, 16 bp, synthetic construct
  source 1..16: mol_type = other DNA
ccaataaaagttcggt

SEQ ID NO: 526 - DNA, 16 bp, synthetic construct
  source 1..16: mol_type = other DNA
ctagtaataacaggct

SEQ ID NO: 527 - DNA, 16 bp, synthetic construct
  source 1..16: mol_type = other DNA
gattatgagattcctc

SEQ ID NO: 528 - DNA, 16 bp, synthetic construct
  source 1..16: mol_type = other DNA
aaaattgaggattcga

SEQ ID NO: 529 - DNA, 16 bp, synthetic construct
  source 1..16: mol_type = other DNA
accaattacatggcac

SEQ ID NO: 530 - DNA, 16 bp, synthetic construct
  source 1..16: mol_type = other DNA
cactttatatagccag

SEQ ID NO: 531 - DNA, 16 bp, synthetic construct
  source 1..16: mol_type = other DNA
aaggttagaataccca

SEQ ID NO: 532 - DNA, 16 bp, synthetic construct
  source 1..16: mol_type = other DNA
catctacgatattcag

SEQ ID NO: 533 - DNA, 16 bp, synthetic construct
  source 1..16: mol_type = other DNA
agcaattagagtcatc

SEQ ID NO: 534 - DNA, 16 bp, synthetic construct
  source 1..16: mol_type = other DNA
gcactaataggcatcc

SEQ ID NO: 535 - DNA, 16 bp, synthetic construct
  source 1..16: mol_type = other DNA
gaatatcattgattgg

SEQ ID NO: 536 - DNA, 16 bp, synthetic construct
  source 1..16: mol_type = other DNA
aagtagtatagtgtgc

SEQ ID NO: 537 - DNA, 16 bp, synthetic construct
  source 1..16: mol_type = other DNA
atcaatgtaagtggtc

SEQ ID NO: 538 - DNA, 16 bp, synthetic construct
  source 1..16: mol_type = other DNA
ggactataatgatctt

SEQ ID NO: 539 - DNA, 16 bp, synthetic construct
  source 1..16: mol_type = other DNA
gcattagtaaatctcc

SEQ ID NO: 540 - DNA, 16 bp, synthetic construct
  source 1..16: mol_type = other DNA
gtttatacagccatca

SEQ ID NO: 541 - DNA, 16 bp, synthetic construct
  source 1..16: mol_type = other DNA
ctatagtatatgtctg

SEQ ID NO: 542 - DNA, 16 bp, synthetic construct
  source 1..16: mol_type = other DNA
ctttattactagcggt

SEQ ID NO: 543 - DNA, 16 bp, synthetic construct
  source 1..16: mol_type = other DNA
ggaaattcgatttctg

SEQ ID NO: 544 - DNA, 16 bp, synthetic construct
  source 1..16: mol_type = other DNA
gaaaatttcgagtctt

SEQ ID NO: 545 - DNA, 16 bp, synthetic construct
  source 1..16: mol_type = other DNA
gatgtaatatgggcaa

SEQ ID NO: 546 - DNA, 16 bp, synthetic construct
  source 1..16: mol_type = other DNA
cttaattatactagtc

SEQ ID NO: 547 - DNA, 16 bp, synthetic construct
  source 1..16: mol_type = other DNA
ccatataagatctccc

SEQ ID NO: 548 - DNA, 16 bp, synthetic construct
  source 1..16: mol_type = other DNA
cttattaaaggtgtcc

SEQ ID NO: 549 - DNA, 16 bp, synthetic construct
  source 1..16: mol_type = other DNA
aagcatagtacgcagc

SEQ ID NO: 550 - DNA, 16 bp, synthetic construct
  source 1..16: mol_type = other DNA
tagtatagtgtgccta

SEQ ID NO: 551 - DNA, 16 bp, synthetic construct
  source 1..16: mol_type = other DNA
gataatttacgaccgt

SEQ ID NO: 552 - DNA, 16 bp, synthetic construct
  source 1..16: mol_type = other DNA
gcagtatagagtcctt

SEQ ID NO: 553 - DNA, 16 bp, synthetic construct
  source 1..16: mol_type = other DNA
ctcgataaagcatgtg

SEQ ID NO: 554 - DNA, 16 bp, synthetic construct
  source 1..16: mol_type = other DNA
gacttaacatgactcc

SEQ ID NO: 555 - DNA, 16 bp, synthetic construct
  source 1..16: mol_type = other DNA
cttgattagtgttcca

SEQ ID NO: 556 - DNA, 16 bp, synthetic construct
  source 1..16: mol_type = other DNA
acaatacaggctccgc

SEQ ID NO: 557 - DNA, 16 bp, synthetic construct
  source 1..16: mol_type = other DNA
taagatgcaagggtcc

SEQ ID NO: 558 - DNA, 16 bp, synthetic construct
  source 1..16: mol_type = other DNA
gatacttaagttctgc

SEQ ID NO: 559 - DNA, 16 bp, synthetic construct
  source 1..16: mol_type = other DNA
acagtatgagctctcc

SEQ ID NO: 560 - DNA, 16 bp, synthetic construct
  source 1..16: mol_type = other DNA
gatactacatacccag

SEQ ID NO: 561 - RNA, 23 nt, synthetic construct
  source 1..23: mol_type = other RNA
tgtctcgctttctctgtctgtct

SEQ ID NO: 562 - RNA, 23 nt, synthetic construct
  source 1..23: mol_type = other RNA
tctgtctcgctttctctgtctgt

SEQ ID NO: 563 - RNA, 23 nt, synthetic construct
  source 1..23: mol_type = other RNA
ttgatttcatcttcccggagagg

SEQ ID NO: 564 - RNA, 23 nt, synthetic construct
  source 1..23: mol_type = other RNA
tcaaagccccggtctttctaatg

SEQ ID NO: 565 - RNA, 23 nt, synthetic construct
  source 1..23: mol_type = other RNA
ttcgtctaggaaatcaaagttaa

SEQ ID NO: 566 - RNA, 23 nt, synthetic construct
  source 1..23: mol_type = other RNA
tacttgaggcgaaggtaaagagg

SEQ ID NO: 567 - RNA, 23 nt, synthetic construct
  source 1..23: mol_type = other RNA
tttaccccttcaaagttagccgg

SEQ ID NO: 568 - RNA, 23 nt, synthetic construct
  source 1..23: mol_type = other RNA
tgctcctcttctaccgagtactt

SEQ ID NO: 569 - RNA, 23 nt, synthetic construct
  source 1..23: mol_type = other RNA
ttccattgagctggacatgacct

SEQ ID NO: 570 - RNA, 23 nt, synthetic construct
  source 1..23: mol_type = other RNA
ttttccaccacgagttcggcaaa

SEQ ID NO: 571 - RNA, 23 nt, synthetic construct
  source 1..23: mol_type = other RNA
tcattggagtcggtcaccttgat

SEQ ID NO: 572 - RNA, 23 nt, synthetic construct
  source 1..23: mol_type = other RNA
tagccatagaaggagtagaccac

SEQ ID NO: 573 - RNA, 23 nt, synthetic construct
  source 1..23: mol_type = other RNA
tcgttgacgtagccatagaagga

SEQ ID NO: 574 - RNA, 23 nt, synthetic construct
  source 1..23: mol_type = other RNA
tagtctaaagcgccagtgacagt

SEQ ID NO: 575 - RNA, 23 nt, synthetic construct
  source 1..23: mol_type = other RNA
tcttcgtagtctaaagcgccagt

SEQ ID NO: 576 - RNA, 23 nt, synthetic construct
  source 1..23: mol_type = other RNA
ttgatgaccggcggattgtcatt

SEQ ID NO: 577 - RNA, 23 nt, synthetic construct
  source 1..23: mol_type = other RNA
ttgactgacagcaggttgatgac

SEQ ID NO: 578 - RNA, 23 nt, synthetic construct
  source 1..23: mol_type = other RNA
tccacaagctcactgttgactga

SEQ ID NO: 579 - RNA, 23 nt, synthetic construct
  source 1..23: mol_type = other RNA
tccaccagaatagtggagaagct

SEQ ID NO: 580 - RNA, 23 nt, synthetic construct
  source 1..23: mol_type = other RNA
tgtgaggttgtattggtcgtgct

SEQ ID NO: 581 - RNA, 23 nt, synthetic construct
  source 1..23: mol_type = other RNA
tgatgagcacggtaaaggacttg

SEQ ID NO: 582 - RNA, 23 nt, synthetic construct
  source 1..23: mol_type = other RNA
tgtcattttcgtcagtgatgagc

SEQ ID NO: 583 - RNA, 23 nt, synthetic construct
  source 1..23: mol_type = other RNA
tggtagtagggcttggaaaagtg

SEQ ID NO: 584 - RNA, 23 nt, synthetic construct
  source 1..23: mol_type = other RNA
tcctgcacaatgacctggtagta

SEQ ID NO: 585 - RNA, 23 nt, synthetic construct
  source 1..23: mol_type = other RNA
ttgggattgatggagacataggt

SEQ ID NO: 586 - RNA, 23 nt, synthetic construct
  source 1..23: mol_type = other RNA
tagatgtcgcctgagttgggatt

SEQ ID NO: 587 - RNA, 23 nt, synthetic construct
  source 1..23: mol_type = other RNA
ttaaaggatcgcagcgcgtagat

SEQ ID NO: 588 - RNA, 23 nt, synthetic construct
  source 1..23: mol_type = other RNA
ttggtctgctcgtggttaaagga

SEQ ID NO: 589 - RNA, 23 nt, synthetic construct
  source 1..23: mol_type = other RNA
ttgaattcgaacgccttggtctg

SEQ ID NO: 590 - RNA, 23 nt, synthetic construct
  source 1..23: mol_type = other RNA
ttggccagcaccttgaattcgaa

SEQ ID NO: 591 - RNA, 23 nt, synthetic construct
  source 1..23: mol_type = other RNA
ttgtcgttgacgtcgaggatgat

SEQ ID NO: 592 - RNA, 23 nt, synthetic construct
  source 1..23: mol_type = other RNA
ttaatcagaggtggggctgtgat

SEQ ID NO: 593 - RNA, 23 nt, synthetic construct
  source 1..23: mol_type = other RNA
tagtcttctgccttgacaacagt

SEQ ID NO: 594 - RNA, 23 nt, synthetic construct
  source 1..23: mol_type = other RNA
ttttcgccctcatcgtagtcttc

SEQ ID NO: 595 - RNA, 23 nt, synthetic construct
  source 1..23: mol_type = other RNA
tctatttcaaagaagccgcggtc

SEQ ID NO: 596 - RNA, 23 nt, synthetic construct
  source 1..23: mol_type = other RNA
tcgccattgacctggtctatttc

SEQ ID NO: 597 - RNA, 23 nt, synthetic construct
  source 1..23: mol_type = other RNA
taagctcataggaggacttggag

SEQ ID NO: 598 - RNA, 23 nt, synthetic construct
  source 1..23: mol_type = other RNA
tgagccaccacgataagctcata

SEQ ID NO: 599 - RNA, 23 nt, synthetic construct
  source 1..23: mol_type = other RNA
ttcacagagcccattgactcttg

SEQ ID NO: 600 - RNA, 23 nt, synthetic construct
  source 1..23: mol_type = other RNA
ttacaaagaggatgcccgcaatg

SEQ ID NO: 601 - RNA, 23 nt, synthetic construct
  source 1..23: mol_type = other RNA
taaacaattactgcagttgtagg

SEQ ID NO: 602 - RNA, 23 nt, synthetic construct
  source 1..23: mol_type = other RNA
tataaaacagccgaggagacaag

SEQ ID NO: 603 - RNA, 23 nt, synthetic construct
  source 1..23: mol_type = other RNA
tcgctaatgggagaaaccgagat

SEQ ID NO: 604 - RNA, 23 nt, synthetic construct
  source 1..23: mol_type = other RNA
tttttgtcttgctcctcgctaat

SEQ ID NO: 605 - RNA, 23 nt, synthetic construct
  source 1..23: mol_type = other RNA
tttccccttaggctcactttctc

SEQ ID NO: 606 - RNA, 23 nt, synthetic construct
  source 1..23: mol_type = other RNA
tactcagcaattctctttcccct

SEQ ID NO: 607 - RNA, 23 nt, synthetic construct
  source 1..23: mol_type = other RNA
tgctggtggtagtcaaaatagtt

SEQ ID NO: 608 - RNA, 23 nt, synthetic construct
  source 1..23: mol_type = other RNA
ttagcactggtgttgcgggtatt

SEQ ID NO: 609 - RNA, 23 nt, synthetic construct
  source 1..23: mol_type = other RNA
tgatggtagatgtggttagcact

SEQ ID NO: 610 - RNA, 23 nt, synthetic construct
  source 1..23: mol_type = other RNA
tggctgttgaaagagtgatggta

SEQ ID NO: 611 - RNA, 23 nt, synthetic construct
  source 1..23: mol_type = other RNA
ttgataatcaggtcaggctgctg

SEQ ID NO: 612 - RNA, 23 nt, synthetic construct
  source 1..23: mol_type = other RNA
tagttttcagtctcaggcagagg

SEQ ID NO: 613 - RNA, 23 nt, synthetic construct
  source 1..23: mol_type = other RNA
ttggagtcaaaagaatagttttc

SEQ ID NO: 614 - RNA, 23 nt, synthetic construct
  source 1..23: mol_type = other RNA
tgattaaatgggctcggctattc

SEQ ID NO: 615 - RNA, 23 nt, synthetic construct
  source 1..23: mol_type = other RNA
tctaagtccttgaaggtggagct

SEQ ID NO: 616 - RNA, 23 nt, synthetic construct
  source 1..23: mol_type = other RNA
tgtccactatccttcaggctgtt

SEQ ID NO: 617 - RNA, 23 nt, synthetic construct
  source 1..23: mol_type = other RNA
tggacatcatgctcactgtcagt

SEQ ID NO: 618 - RNA, 23 nt, synthetic construct
  source 1..23: mol_type = other RNA
tgatcaggcatctgagatcccat

SEQ ID NO: 619 - RNA, 23 nt, synthetic construct
  source 1..23: mol_type = other RNA
tcccggcaatgaaatccttcatt

SEQ ID NO: 620 - RNA, 23 nt, synthetic construct
  source 1..23: mol_type = other RNA
tcaatagacagcgcgatgatgtt

SEQ ID NO: 621 - RNA, 23 nt, synthetic construct
  source 1..23: mol_type = other RNA
tcagcagcagtagcttcaataga

SEQ ID NO: 622 - RNA, 23 nt, synthetic construct
  source 1..23: mol_type = other RNA
tggtcgctgacatctttcccaaa

SEQ ID NO: 623 - RNA, 23 nt, synthetic construct
  source 1..23: mol_type = other RNA
ttgacatactgctccagatcacg

SEQ ID NO: 624 - RNA, 23 nt, synthetic construct
  source 1..23: mol_type = other RNA
tgactttctcgctatcagctcca

SEQ ID NO: 625 - RNA, 23 nt, synthetic construct
  source 1..23: mol_type = other RNA
tgttgcgaccttccttcagaatg

SEQ ID NO: 626 - RNA, 23 nt, synthetic construct
  source 1..23: mol_type = other RNA
ttcacaccaggggactctttgtt

SEQ ID NO: 627 - RNA, 23 nt, synthetic construct
  source 1..23: mol_type = other RNA
tcttcttcctggagactggttta

SEQ ID NO: 628 - RNA, 23 nt, synthetic construct
  source 1..23: mol_type = other RNA
ttggtgagcaattaaaacaagaa

SEQ ID NO: 629 - RNA, 23 nt, synthetic construct
  source 1..23: mol_type = other RNA
tctgaaatatagccactcaagaa

SEQ ID NO: 630 - RNA, 23 nt, synthetic construct
  source 1..23: mol_type = other RNA
tcacctataaacaatacatttag

SEQ ID NO: 631 - RNA, 23 nt, synthetic construct
  source 1..23: mol_type = other RNA
ttgaaacaagggactgtcacaga

SEQ ID NO: 632 - RNA, 23 nt, synthetic construct
  source 1..23: mol_type = other RNA
tgcctgttgaaacaagggactgt

SEQ ID NO: 633 - RNA, 23 nt, synthetic construct
  source 1..23: mol_type = other RNA
ttgtctctgtttccccaacatca

SEQ ID NO: 634 - RNA, 23 nt, synthetic construct
  source 1..23: mol_type = other RNA
ttttcacaactgaatttgtctct

SEQ ID NO: 635 - RNA, 23 nt, synthetic construct
  source 1..23: mol_type = other RNA
ttgacatagaaaaatatataaat

SEQ ID NO: 636 - RNA, 23 nt, synthetic construct
  source 1..23: mol_type = other RNA
tttatattataattttgacatag

SEQ ID NO: 637 - RNA, 23 nt, synthetic construct
  source 1..23: mol_type = other RNA
ttaaatgtaatcctccacaaaca

SEQ ID NO: 638 - RNA, 23 nt, synthetic construct
  source 1..23: mol_type = other RNA
tcactttttgcttttttaaatgt

SEQ ID NO: 639 - RNA, 23 nt, synthetic construct
  source 1..23: mol_type = other RNA
tcacatcactgaatcaatgaata

SEQ ID NO: 640 - RNA, 23 nt, synthetic construct
  source 1..23: mol_type = other RNA
tttgggggctcaatttcacatca

SEQ ID NO: 641 - RNA, 23 nt, synthetic construct
  source 1..23: mol_type = other RNA
tgggaagtactcgagcttcagaa

SEQ ID NO: 642 - RNA, 23 nt, synthetic construct
  source 1..23: mol_type = other RNA
ttttaaagcaggggtgtccacag

SEQ ID NO: 643 - RNA, 23 nt, synthetic construct
  source 1..23: mol_type = other RNA
tttttaagaaaaagaaaacacca

SEQ ID NO: 644 - RNA, 23 nt, synthetic construct
  source 1..23: mol_type = other RNA
tgtagttttattatttttttaag

SEQ ID NO: 645 - RNA, 23 nt, synthetic construct
  source 1..23: mol_type = other RNA
tgtctcagttgtttgcactttgt

SEQ ID NO: 646 - RNA, 23 nt, synthetic construct
  source 1..23: mol_type = other RNA
tgctcattcatttgctgtctcag

SEQ ID NO: 647 - RNA, 23 nt, synthetic construct
  source 1..23: mol_type = other RNA
tcactacatgagttaaaaaacgt

SEQ ID NO: 648 - RNA, 23 nt, synthetic construct
  source 1..23: mol_type = other RNA
tagcagcctatccaaaaatgact

SEQ ID NO: 649 - RNA, 23 nt, synthetic construct
  source 1..23: mol_type = other RNA
ttctaagcctggaaacataactt

SEQ ID NO: 650 - RNA, 23 nt, synthetic construct
  source 1..23: mol_type = other RNA
ttggagagagggaatttctaagc

SEQ ID NO: 651 - RNA, 23 nt, synthetic construct
  source 1..23: mol_type = other RNA
ttcaattttagatgattggagag

SEQ ID NO: 652 - RNA, 23 nt, synthetic construct
  source 1..23: mol_type = other RNA
tctaattctaatcatgattggga

SEQ ID NO: 653 - RNA, 23 nt, synthetic construct
  source 1..23: mol_type = other RNA
tgacgtgctttgcagtctaattc

SEQ ID NO: 654 - RNA, 23 nt, synthetic construct
  source 1..23: mol_type = other RNA
tactgcttactctatccctacgt

SEQ ID NO: 655 - RNA, 23 nt, synthetic construct
  source 1..23: mol_type = other RNA
ttacctgtcttttccaaaatata

SEQ ID NO: 656 - RNA, 23 nt, synthetic construct
  source 1..23: mol_type = other RNA
tccgtttagaaggcacagtaatt

SEQ ID NO: 657 - RNA, 23 nt, synthetic construct
  source 1..23: mol_type = other RNA
taaaaagatgagttcaagtgtct

SEQ ID NO: 658 - RNA, 23 nt, synthetic construct
  source 1..23: mol_type = other RNA
tcacatttttaatcaaaaaacta

SEQ ID NO: 659 - RNA, 23 nt, synthetic construct
  source 1..23: mol_type = other RNA
ttagtattttcttgttcacattt

SEQ ID NO: 660 - RNA, 23 nt, synthetic construct
  source 1..23: mol_type = other RNA
tagcctacagcaaaaagagttgg

SEQ ID NO: 661 - RNA, 23 nt, synthetic construct
  source 1..23: mol_type = other RNA
taatagacaaaagataaatgggg

SEQ ID NO: 662 - RNA, 23 nt, synthetic construct
  source 1..23: mol_type = other RNA
ttggctagtgaatattaatagac

SEQ ID NO: 663 - RNA, 23 nt, synthetic construct
  source 1..23: mol_type = other RNA
tgcaaaaatactatgttggctag

SEQ ID NO: 664 - RNA, 23 nt, synthetic construct
  source 1..23: mol_type = other RNA
ttgtttctctagaaacaactctc

SEQ ID NO: 665 - RNA, 23 nt, synthetic construct
  source 1..23: mol_type = other RNA
ttctctctgtgtattcctgaatt

SEQ ID NO: 666 - RNA, 23 nt, synthetic construct
  source 1..23: mol_type = other RNA
tctaacctctaggccttctctct

SEQ ID NO: 667 - RNA, 23 nt, synthetic construct
  source 1..23: mol_type = other RNA
tttgcattctagtgctctaacct

SEQ ID NO: 668 - RNA, 23 nt, synthetic construct
  source 1..23: mol_type = other RNA
tctacctaaacttaagaaaataa

SEQ ID NO: 669 - RNA, 23 nt, synthetic construct
  source 1..23: mol_type = other RNA
taatgcgtaaagctaggaactca

SEQ ID NO: 670 - RNA, 23 nt, synthetic construct
  source 1..23: mol_type = other RNA
tctccctcctgtaaaagaaaata

SEQ ID NO: 671 - RNA, 23 nt, synthetic construct
  source 1..23: mol_type = other RNA
tcaaaacccttctccctcctgta

SEQ ID NO: 672 - RNA, 23 nt, synthetic construct
  source 1..23: mol_type = other RNA
taagttctttttcagaaatgttc

SEQ ID NO: 673 - RNA, 23 nt, synthetic construct
  source 1..23: mol_type = other RNA
tttgtagcttcattataagttct

SEQ ID NO: 674 - RNA, 23 nt, synthetic construct
  source 1..23: mol_type = other RNA
tttgcatgaggtagtattcagca

SEQ ID NO: 675 - RNA, 23 nt, synthetic construct
  source 1..23: mol_type = other RNA
tcagagggaaatttgcagccaca

SEQ ID NO: 676 - RNA, 23 nt, synthetic construct
  source 1..23: mol_type = other RNA
ttaattgtgtcagcttcagaggg

SEQ ID NO: 677 - RNA, 23 nt, synthetic construct
  source 1..23: mol_type = other RNA
tatggtaattcatccttaattgt

SEQ ID NO: 678 - RNA, 23 nt, synthetic construct
  source 1..23: mol_type = other RNA
tccactaccaaaatgaaataaat

SEQ ID NO: 679 - RNA, 23 nt, synthetic construct
  source 1..23: mol_type = other RNA
tgcaaagagaaataaatacttaa

SEQ ID NO: 680 - RNA, 23 nt, synthetic construct
  source 1..23: mol_type = other RNA
tcaggatggatcagggtgagaaa

SEQ ID NO: 681 - RNA, 23 nt, synthetic construct
  source 1..23: mol_type = other RNA
ttcccactgagcatagcaagaaa

SEQ ID NO: 682 - RNA, 23 nt, synthetic construct
  source 1..23: mol_type = other RNA
tgactgcccactgagaacaaagt

SEQ ID NO: 683 - RNA, 23 nt, synthetic construct
  source 1..23: mol_type = other RNA
ttccttaatgagaggaattctct

SEQ ID NO: 684 - RNA, 23 nt, synthetic construct
  source 1..23: mol_type = other RNA
tgtggggaaaaatatttccttaa

SEQ ID NO: 685 - RNA, 23 nt, synthetic construct
  source 1..23: mol_type = other RNA
tacagcctgcctacaaaaccagt

SEQ ID NO: 686 - RNA, 23 nt, synthetic construct
  source 1..23: mol_type = other RNA
tcattaaagcatgtcacacttca

SEQ ID NO: 687 - RNA, 23 nt, synthetic construct
  source 1..23: mol_type = other RNA
ttgccaaagcagttatcattaaa

SEQ ID NO: 688 - RNA, 23 nt, synthetic construct
  source 1..23: mol_type = other RNA
tacctgtctggggaattgccaaa

SEQ ID NO: 689 - RNA, 23 nt, synthetic construct
  source 1..23: mol_type = other RNA
ttggatgaagaagtatacctgtc

SEQ ID NO: 690 - RNA, 23 nt, synthetic construct
  source 1..23: mol_type = other RNA
tttgtctaaatgaacaccttagg

SEQ ID NO: 691 - RNA, 23 nt, synthetic construct
  source 1..23: mol_type = other RNA
tagagatcagtggatcactaagc

SEQ ID NO: 692 - RNA, 23 nt, synthetic construct
  source 1..23: mol_type = other RNA
tgtattttttaaaaatatttctg

SEQ ID NO: 693 - RNA, 23 nt, synthetic construct
  source 1..23: mol_type = other RNA
ttcagagatctaaattgtatttt

SEQ ID NO: 694 - RNA, 23 nt, synthetic construct
  source 1..23: mol_type = other RNA
tgagtggttccaattttcagaga

SEQ ID NO: 695 - RNA, 23 nt, synthetic construct
  source 1..23: mol_type = other RNA
tcaagatgatactcttgagtggt

SEQ ID NO: 696 - RNA, 23 nt, synthetic construct
  source 1..23: mol_type = other RNA
tatgatagggctacagggaaaag

SEQ ID NO: 697 - RNA, 23 nt, synthetic construct
  source 1..23: mol_type = other RNA
tgcttcaagtggaccactttttg

SEQ ID NO: 698 - RNA, 23 nt, synthetic construct
  source 1..23: mol_type = other RNA
tccctaaactgccctttgtcctt

SEQ ID NO: 699 - RNA, 23 nt, synthetic construct
  source 1..23: mol_type = other RNA
ttttccactctggatgcccaatc

SEQ ID NO: 700 - RNA, 23 nt, synthetic construct
  source 1..23: mol_type = other RNA
taaagagccaagtggaccaaact

SEQ ID NO: 701 - RNA, 23 nt, synthetic construct
  source 1..23: mol_type = other RNA
tcttattacccggggtaaagagc

SEQ ID NO: 702 - RNA, 23 nt, synthetic construct
  source 1..23: mol_type = other RNA
tttatgccagtttttcaaagtca

SEQ ID NO: 703 - RNA, 23 nt, synthetic construct
  source 1..23: mol_type = other RNA
tacaatttgactcatgaaatgac

SEQ ID NO: 704 - RNA, 23 nt, synthetic construct
  source 1..23: mol_type = other RNA
ttcagtgtcagcagatacaattt

SEQ ID NO: 705 - RNA, 23 nt, synthetic construct
  source 1..23: mol_type = other RNA
ttactttgttacatacttaaact

SEQ ID NO: 706 - RNA, 23 nt, synthetic construct
  source 1..23: mol_type = other RNA
tcacttttgcacaacaagtgacc

SEQ ID NO: 707 - RNA, 23 nt, synthetic construct
  source 1..23: mol_type = other RNA
tttctttgtttcacaaaagcaat

SEQ ID NO: 708 - RNA, 23 nt, synthetic construct
  source 1..23: mol_type = other RNA
taccaagagcgccttccaatcta

SEQ ID NO: 709 - RNA, 23 nt, synthetic construct
  source 1..23: mol_type = other RNA
ttgtgggttattctttaccaaga

SEQ ID NO: 710 - RNA, 23 nt, synthetic construct
  source 1..23: mol_type = other RNA
tggagcaacagtcagcatcatca

SEQ ID NO: 711 - RNA, 23 nt, synthetic construct
  source 1..23: mol_type = other RNA
tgctaaggttgacagcaactttc

SEQ ID NO: 712 - RNA, 23 nt, synthetic construct
  source 1..23: mol_type = other RNA
tatcctagccttcctcagctgaa

SEQ ID NO: 713 - RNA, 23 nt, synthetic construct
  source 1..23: mol_type = other RNA
tgatttctagctcgagctagtct

SEQ ID NO: 714 - RNA, 23 nt, synthetic construct
  source 1..23: mol_type = other RNA
tttccaccctggtttgacaggta

SEQ ID NO: 715 - RNA, 23 nt, synthetic construct
  source 1..23: mol_type = other RNA
ttgcatccctctaaatttccacc

SEQ ID NO: 716 - RNA, 23 nt, synthetic construct
  source 1..23: mol_type = other RNA
tgagacatactgtacttgcatcc

SEQ ID NO: 717 - RNA, 23 nt, synthetic construct
  source 1..23: mol_type = other RNA
ttcatataatcagcaacagagac

SEQ ID NO: 718 - RNA, 23 nt, synthetic construct
  source 1..23: mol_type = other RNA
tacaacaattttatcttcatata

SEQ ID NO: 719 - RNA, 23 nt, synthetic construct
  source 1..23: mol_type = other RNA
tgattcaatcactgtgaaaatgt

SEQ ID NO: 720 - RNA, 23 nt, synthetic construct
  source 1..23: mol_type = other RNA
tttttctttttacaatgattcaa

SEQ ID NO: 721 - RNA, 23 nt, synthetic construct
  source 1..23: mol_type = other RNA
tttttgaagcagagaaaacacat

SEQ ID NO: 722 - RNA, 23 nt, synthetic construct
  source 1..23: mol_type = other RNA
taatagcctttaatactaaaatg

SEQ ID NO: 723 - RNA, 23 nt, synthetic construct
  source 1..23: mol_type = other RNA
ttttcggatgaaatcgctcagcc

SEQ ID NO: 724 - RNA, 23 nt, synthetic construct
  source 1..23: mol_type = other RNA
tgtaggaggtttaggatttcgga

SEQ ID NO: 725 - RNA, 23 nt, synthetic construct
  source 1..23: mol_type = other RNA
tatgggtttggggtaggaggttt

SEQ ID NO: 726 - RNA, 23 nt, synthetic construct
  source 1..23: mol_type = other RNA
tcttgcaggagcgtcttgatttc

SEQ ID NO: 727 - RNA, 23 nt, synthetic construct
  source 1..23: mol_type = other RNA
taagtttacttgcaggagcgtct

SEQ ID NO: 728 - RNA, 23 nt, synthetic construct
  source 1..23: mol_type = other RNA
tattttgtcgccgccgaagttta

SEQ ID NO: 729 - RNA, 23 nt, synthetic construct
  source 1..23: mol_type = other RNA
ttttgtccaagaaaatcaaagcc

SEQ ID NO: 730 - RNA, 23 nt, synthetic construct
  source 1..23: mol_type = other RNA
tggagatggcaatttgtccaaga

SEQ ID NO: 731 - RNA, 23 nt, synthetic construct
  source 1..23: mol_type = other RNA
tagtttgtggaaacggggagatg

SEQ ID NO: 732 - RNA, 23 nt, synthetic construct
  source 1..23: mol_type = other RNA
tctccacgtcaagtttgtggaaa

SEQ ID NO: 733 - RNA, 23 nt, synthetic construct
  source 1..23: mol_type = other RNA
taagttaacaacgcagtccgacc

SEQ ID NO: 734 - RNA, 23 nt, synthetic construct
  source 1..23: mol_type = other RNA
tggcgttttcgtctaggaaatca

SEQ ID NO: 735 - RNA, 23 nt, synthetic construct
  source 1..23: mol_type = other RNA
tacagtacttgaggcgaaggtaa

SEQ ID NO: 736 - RNA, 23 nt, synthetic construct
  source 1..23: mol_type = other RNA
tgctactcagttttaccccttca

SEQ ID NO: 737 - RNA, 23 nt, synthetic construct
  source 1..23: mol_type = other RNA
tcttgagattaatgagggcggca

SEQ ID NO: 738 - RNA, 23 nt, synthetic construct
  source 1..23: mol_type = other RNA
tctcttctaccgagtacttgaga

SEQ ID NO: 739 - RNA, 23 nt, synthetic construct
  source 1..23: mol_type = other RNA
tttgatgtccactaggtgtggag

SEQ ID NO: 740 - RNA, 23 nt, synthetic construct
  source 1..23: mol_type = other RNA
tgagctgggattgatgtccacta

SEQ ID NO: 741 - RNA, 23 nt, synthetic construct
  source 1..23: mol_type = other RNA
tatcttctgcttggtgaccagca

SEQ ID NO: 742 - RNA, 23 nt, synthetic construct
  source 1..23: mol_type = other RNA
tagcagatcacggtcaatcttct

SEQ ID NO: 743 - RNA, 23 nt, synthetic construct
  source 1..23: mol_type = other RNA
tacagcagatcacggtcaatctt

SEQ ID NO: 744 - RNA, 23 nt, synthetic construct
  source 1..23: mol_type = other RNA
ttttatcacgcagatttccattg

SEQ ID NO: 745 - RNA, 23 nt, synthetic construct
  source 1..23: mol_type = other RNA
ttccttgatctccacctttatca

SEQ ID NO: 746 - RNA, 23 nt, synthetic construct
  source 1..23: mol_type = other RNA
tcattgtcgttcaggtccttgat

SEQ ID NO: 747 - RNA, 23 nt, synthetic construct
  source 1..23: mol_type = other RNA
tgcttcctgagtctggatcgtaa

SEQ ID NO: 748 - RNA, 23 nt, synthetic construct
  source 1..23: mol_type = other RNA
taagcttcctgagtctggatcgt

SEQ ID NO: 749 - RNA, 23 nt, synthetic construct
  source 1..23: mol_type = other RNA
tccttgatactaaggccaacggt

SEQ ID NO: 750 - RNA, 23 nt, synthetic construct
  source 1..23: mol_type = other RNA
tacaccgggttgttgtcattgga

SEQ ID NO: 751 - RNA, 23 nt, synthetic construct
  source 1..23: mol_type = other RNA
tctaaacaccgggttgttgtcat

SEQ ID NO: 752 - RNA, 23 nt, synthetic construct
  source 1..23: mol_type = other RNA
ttattcctgcagtcgaaagggca

SEQ ID NO: 753 - RNA, 23 nt, synthetic construct
  source 1..23: mol_type = other RNA
tgtggagaagctctcatattcct

SEQ ID NO: 754 - RNA, 23 nt, synthetic construct
  source 1..23: mol_type = other RNA
tgtgcctgaattgtgaggttgta

SEQ ID NO: 755 - RNA, 23 nt, synthetic construct
  source 1..23: mol_type = other RNA
taaagtgcgggtggttgtcattt

SEQ ID NO: 756 - RNA, 23 nt, synthetic construct
  source 1..23: mol_type = other RNA
taaaagtgcgggtggttgtcatt

SEQ ID NO: 757 - RNA, 23 nt, synthetic construct
  source 1..23: mol_type = other RNA
tgtgttgttctcctgcacaatga

SEQ ID NO: 758 - RNA, 23 nt, synthetic construct
  source 1..23: mol_type = other RNA
tcataggtgaagacaggcatgtc

SEQ ID NO: 759 - RNA, 23 nt, synthetic construct
  source 1..23: mol_type = other RNA
tcaacagtcaccaggtagcctat

SEQ ID NO: 760 - RNA, 23 nt, synthetic construct
  source 1..23: mol_type = other RNA
tattttcgccctcatcgtagtct

SEQ ID NO: 761 - RNA, 23 nt, synthetic construct
  source 1..23: mol_type = other RNA
tcttcgccattgacctggtctat

SEQ ID NO: 762 - RNA, 23 nt, synthetic construct
  source 1..23: mol_type = other RNA
tgtagattaggacgagagcagag

SEQ ID NO: 763 - RNA, 23 nt, synthetic construct
  source 1..23: mol_type = other RNA
tagagcaggggacaagtagatta

SEQ ID NO: 764 - RNA, 23 nt, synthetic construct
  source 1..23: mol_type = other RNA
taaatcaaggacaagttcacaga

SEQ ID NO: 765 - RNA, 23 nt, synthetic construct
  source 1..23: mol_type = other RNA
tccagggcaataatgaaaatcaa

SEQ ID NO: 766 - RNA, 23 nt, synthetic construct
  source 1..23: mol_type = other RNA
tatggagcccagggcaataatga

SEQ ID NO: 767 - RNA, 23 nt, synthetic construct
  source 1..23: mol_type = other RNA
tcacgaagatcatagttacaaag

SEQ ID NO: 768 - RNA, 23 nt, synthetic construct
  source 1..23: mol_type = other RNA
tttgcacttgattgccacgaaga

SEQ ID NO: 769 - RNA, 23 nt, synthetic construct
  source 1..23: mol_type = other RNA
ttctttgttgtctcgcttgcact

SEQ ID NO: 770 - RNA, 23 nt, synthetic construct
  source 1..23: mol_type = other RNA
tttgtaggtccggatctctttgt

SEQ ID NO: 771 - RNA, 23 nt, synthetic construct
  source 1..23: mol_type = other RNA
tagacaagtgatggttaaacaat

SEQ ID NO: 772 - RNA, 23 nt, synthetic construct
  source 1..23: mol_type = other RNA
tctgttttgtccttttataaaac

SEQ ID NO: 773 - RNA, 23 nt, synthetic construct
  source 1..23: mol_type = other RNA
tcaatgcagacacttgctgtttt

SEQ ID NO: 774 - RNA, 23 nt, synthetic construct
  source 1..23: mol_type = other RNA
tagaaaccgagatgcaatgcaga

SEQ ID NO: 775 - RNA, 23 nt, synthetic construct
  source 1..23: mol_type = other RNA
tctttctcctctgtctttttgtc

SEQ ID NO: 776 - RNA, 23 nt, synthetic construct
  source 1..23: mol_type = other RNA
ttgcccataggagtactcagcaa

SEQ ID NO: 777 - RNA, 23 nt, synthetic construct
  source 1..23: mol_type = other RNA
tcttgatttcttttgatgcccat

SEQ ID NO: 778 - RNA, 23 nt, synthetic construct
  source 1..23: mol_type = other RNA
tatttttttcttcttgcttgatt

SEQ ID NO: 779 - RNA, 23 nt, synthetic construct
  source 1..23: mol_type = other RNA
tatgtcattcttactgatttttt

SEQ ID NO: 780 - RNA, 23 nt, synthetic construct
  source 1..23: mol_type = other RNA
ttaccaggcggatgtcattctta

SEQ ID NO: 781 - RNA, 23 nt, synthetic construct
  source 1..23: mol_type = other RNA
ttcttgtctgtctcctccacatc

SEQ ID NO: 782 - RNA, 23 nt, synthetic construct
  source 1..23: mol_type = other RNA
taactgacaacgttcatcttgtc

SEQ ID NO: 783 - RNA, 23 nt, synthetic construct
  source 1..23: mol_type = other RNA
tgggaagagcaactgacaacgtt

SEQ ID NO: 784 - RNA, 23 nt, synthetic construct
  source 1..23: mol_type = other RNA
taatagttgagggaggaggtcag

SEQ ID NO: 785 - RNA, 23 nt, synthetic construct
  source 1..23: mol_type = other RNA
tgtctgctggtggtagtcaaaat

SEQ ID NO: 786 - RNA, 23 nt, synthetic construct
  source 1..23: mol_type = other RNA
tttcaggaaagtgctctcagagc

SEQ ID NO: 787 - RNA, 23 nt, synthetic construct
  source 1..23: mol_type = other RNA
tttctggttctccacattcagga

SEQ ID NO: 788 - RNA, 23 nt, synthetic construct
  source 1..23: mol_type = other RNA
tgggtattctggttctccacatt

SEQ ID NO: 789 - RNA, 23 nt, synthetic construct
  source 1..23: mol_type = other RNA
ttggctgttgaaagagtgatggt

SEQ ID NO: 790 - RNA, 23 nt, synthetic construct
  source 1..23: mol_type = other RNA
tagaggcacaccgttgataatca

SEQ ID NO: 791 - RNA, 23 nt, synthetic construct
  source 1..23: mol_type = other RNA
tgctattcacgtagttggagtca

SEQ ID NO: 792 - RNA, 23 nt, synthetic construct
  source 1..23: mol_type = other RNA
tggtggagctgctcttgattaaa

SEQ ID NO: 793 - RNA, 23 nt, synthetic construct
  source 1..23: mol_type = other RNA
ttgttgccctctaagtccttgaa

SEQ ID NO: 794 - RNA, 23 nt, synthetic construct
  source 1..23: mol_type = other RNA
ttcactctcctcatgtccactat

SEQ ID NO: 795 - RNA, 23 nt, synthetic construct
  source 1..23: mol_type = other RNA
ttcactgtcagtttggtcactct

SEQ ID NO: 796 - RNA, 23 nt, synthetic construct
  source 1..23: mol_type = other RNA
tgtatcacaatacaggctccgct

SEQ ID NO: 797 - RNA, 23 nt, synthetic construct
  source 1..23: mol_type = other RNA
tacatcgttgacagcagtatcac

SEQ ID NO: 798 - RNA, 23 nt, synthetic construct
  source 1..23: mol_type = other RNA
tcactggtgttcagcacatcgtt

SEQ ID NO: 799 - RNA, 23 nt, synthetic construct
  source 1..23: mol_type = other RNA
tcttcattctgatcatgatcagg

SEQ ID NO: 800 - RNA, 23 nt, synthetic construct
  source 1..23: mol_type = other RNA
tgcattcttcccggcaatgaaat

SEQ ID NO: 801 - RNA, 23 nt, synthetic construct
  source 1..23: mol_type = other RNA
ttgatgttcctcacatgctcagg

SEQ ID NO: 802 - RNA, 23 nt, synthetic construct
  source 1..23: mol_type = other RNA
tacatcagcagcagtagcttcaa

SEQ ID NO: 803 - RNA, 23 nt, synthetic construct
  source 1..23: mol_type = other RNA
tgtcgtcataagcctcgacatca

SEQ ID NO: 804 - RNA, 23 nt, synthetic construct
  source 1..23: mol_type = other RNA
taggttgcgaaagtccgtttggt

SEQ ID NO: 805 - RNA, 23 nt, synthetic construct
  source 1..23: mol_type = other RNA
ttgacatctttcccaaaggttgc

SEQ ID NO: 806 - RNA, 23 nt, synthetic construct
  source 1..23: mol_type = other RNA
ttcgacagtcctcttgcctttca

SEQ ID NO: 807 - RNA, 23 nt, synthetic construct
  source 1..23: mol_type = other RNA
ttggtcacatcgacagtcctctt

SEQ ID NO: 808 - RNA, 23 nt, synthetic construct
  source 1..23: mol_type = other RNA
ttggtgtaagacacggaaggctt

SEQ ID NO: 809 - RNA, 23 nt, synthetic construct
  source 1..23: mol_type = other RNA
tatggtgtaagacacggaaggct

SEQ ID NO: 810 - RNA, 23 nt, synthetic construct
  source 1..23: mol_type = other RNA
tcattgttgacattgttgacata

SEQ ID NO: 811 - RNA, 23 nt, synthetic construct
  source 1..23: mol_type = other RNA
tcgagtagggccattgttgacat

SEQ ID NO: 812 - RNA, 23 nt, synthetic construct
  source 1..23: mol_type = other RNA
tctgacctcatgcatgactttct

SEQ ID NO: 813 - RNA, 23 nt, synthetic construct
  source 1..23: mol_type = other RNA
tactctttgttgcgaccttcctt

SEQ ID NO: 814 - RNA, 23 nt, synthetic construct
  source 1..23: mol_type = other RNA
ttatccttcagacgcttcacacc

SEQ ID NO: 815 - RNA, 23 nt, synthetic construct
  source 1..23: mol_type = other RNA
ttggtttagagaacgatatcctt

SEQ ID NO: 816 - RNA, 23 nt, synthetic construct
  source 1..23: mol_type = other RNA
tgtgtggtttctttctcttcttc

SEQ ID NO: 817 - RNA, 23 nt, synthetic construct
  source 1..23: mol_type = other RNA
tttcttcactagccagtgtggtt

SEQ ID NO: 818 - RNA, 23 nt, synthetic construct
  source 1..23: mol_type = other RNA
tacaagaagctcctgcttcttca

SEQ ID NO: 819 - RNA, 23 nt, synthetic construct
  source 1..23: mol_type = other RNA
ttcaagaaccaaccattggtgag

SEQ ID NO: 820 - RNA, 23 nt, synthetic construct
  source 1..23: mol_type = other RNA
tcatttaggaaaagctctgaaat

SEQ ID NO: 821 - RNA, 23 nt, synthetic construct
  source 1..23: mol_type = other RNA
ttcacagaatgataatcacctat

SEQ ID NO: 822 - RNA, 23 nt, synthetic construct
  source 1..23: mol_type = other RNA
ttttgctccaactgaacacccct

SEQ ID NO: 823 - RNA, 23 nt, synthetic construct
  source 1..23: mol_type = other RNA
ttcaagccaaagctaatttgctc

SEQ ID NO: 824 - RNA, 23 nt, synthetic construct
  source 1..23: mol_type = other RNA
tcccatgaacaactcaagccaaa

SEQ ID NO: 825 - RNA, 23 nt, synthetic construct
  source 1..23: mol_type = other RNA
taacatcaaggccccatgaacaa

SEQ ID NO: 826 - RNA, 23 nt, synthetic construct
  source 1..23: mol_type = other RNA
tttaatacataatacttttcaca

SEQ ID NO: 827 - RNA, 23 nt, synthetic construct
  source 1..23: mol_type = other RNA
ttataaattcaaacacttaatac

SEQ ID NO: 828 - RNA, 23 nt, synthetic construct
  source 1..23: mol_type = other RNA
tacaaacaatggtaatttatatt

SEQ ID NO: 829 - RNA, 23 nt, synthetic construct
  source 1..23: mol_type = other RNA
tagagcttttttttttcactttt

SEQ ID NO: 830 - RNA, 23 nt, synthetic construct
  source 1..23: mol_type = other RNA
tttattaaaggtgtccagagctt

SEQ ID NO: 831 - RNA, 23 nt, synthetic construct
  source 1..23: mol_type = other RNA
taaaacagtggcgagcttattaa

SEQ ID NO: 832 - RNA, 23 nt, synthetic construct
  source 1..23: mol_type = other RNA
tttgtctacactacaaaaaacag

SEQ ID NO: 833 - RNA, 23 nt, synthetic construct
  source 1..23: mol_type = other RNA
ttaaatgaccattaacttgtcta

SEQ ID NO: 834 - RNA, 23 nt, synthetic construct
  source 1..23: mol_type = other RNA
tatgaatagtacacaataaatga

SEQ ID NO: 835 - RNA, 23 nt, synthetic construct
  source 1..23: mol_type = other RNA
tttcagaaacaaccttttggggg

SEQ ID NO: 836 - RNA, 23 nt, synthetic construct
  source 1..23: mol_type = other RNA
taaagtagcggcattgggaagta

SEQ ID NO: 837 - RNA, 23 nt, synthetic construct
  source 1..23: mol_type = other RNA
tgctagcaaaagggtttttaaag

SEQ ID NO: 838 - RNA, 23 nt, synthetic construct
  source 1..23: mol_type = other RNA
ttacaacaatagcacagctagca

SEQ ID NO: 839 - RNA, 23 nt, synthetic construct
  source 1..23: mol_type = other RNA
tatttgcaatatcaaatacaaca

SEQ ID NO: 840 - RNA, 23 nt, synthetic construct
  source 1..23: mol_type = other RNA
taccacacacatagcaatttgca

SEQ ID NO: 841 - RNA, 23 nt, synthetic construct
  source 1..23: mol_type = other RNA
taagccttttgccatcaccacac

SEQ ID NO: 842 - RNA, 23 nt, synthetic construct
  source 1..23: mol_type = other RNA
taacaccaacttttaaaagcctt

SEQ ID NO: 843 - RNA, 23 nt, synthetic construct
  source 1..23: mol_type = other RNA
tactttgtttttgtctgtagttt

SEQ ID NO: 844 - RNA, 23 nt, synthetic construct
  source 1..23: mol_type = other RNA
ttatatgcatggtgttgctcatt

SEQ ID NO: 845 - RNA, 23 nt, synthetic construct
  source 1..23: mol_type = other RNA
ttccaagtactcaatctatatgc

SEQ ID NO: 846 - RNA, 23 nt, synthetic construct
  source 1..23: mol_type = other RNA
taaaacgtgagtattctccaagt

SEQ ID NO: 847 - RNA, 23 nt, synthetic construct
  source 1..23: mol_type = other RNA
taaagtggtgagcaatcactaca

SEQ ID NO: 848 - RNA, 23 nt, synthetic construct
  source 1..23: mol_type = other RNA
tggaaaaatactttgcaaagtgg

SEQ ID NO: 849 - RNA, 23 nt, synthetic construct
  source 1..23: mol_type = other RNA
tgaccactgaaaggcaggaaaaa

SEQ ID NO: 850 - RNA, 23 nt, synthetic construct
  source 1..23: mol_type = other RNA
tagaccactgaaaggcaggaaaa

SEQ ID NO: 851 - RNA, 23 nt, synthetic construct
  source 1..23: mol_type = other RNA
ttgatctatcatggacctgggca

SEQ ID NO: 852 - RNA, 23 nt, synthetic construct
  source 1..23: mol_type = other RNA
taatgactttctgcaatgatcta

SEQ ID NO: 853 - RNA, 23 nt, synthetic construct
  source 1..23: mol_type = other RNA
taactgcaaattagatagcagcc

SEQ ID NO: 854 - RNA, 23 nt, synthetic construct
  source 1..23: mol_type = other RNA
tcacagtatttctgacaactgca

SEQ ID NO: 855 - RNA, 23 nt, synthetic construct
  source 1..23: mol_type = other RNA
ttcataaaactttcagcacagta

SEQ ID NO: 856 - RNA, 23 nt, synthetic construct
  source 1..23: mol_type = other RNA
ttttaaaagatggatgtcataaa

SEQ ID NO: 857 - RNA, 23 nt, synthetic construct
  source 1..23: mol_type = other RNA
tttcagggcctgaaaatttaaaa

SEQ ID NO: 858 - RNA, 23 nt, synthetic construct
  source 1..23: mol_type = other RNA
tactttcctgttcagggcctgaa

SEQ ID NO: 859 - RNA, 23 nt, synthetic construct
  source 1..23: mol_type = other RNA
tataacttcaggagcaactttcc

SEQ ID NO: 860 - RNA, 23 nt, synthetic construct
  source 1..23: mol_type = other RNA
ttagattcagtcatcttcaattt

SEQ ID NO: 861 - RNA, 23 nt, synthetic construct
  source 1..23: mol_type = other RNA
tatttagatcttaaaatagattc

SEQ ID NO: 862 - RNA, 23 nt, synthetic construct
  source 1..23: mol_type = other RNA
ttctgaagagatgctaatttaga

SEQ ID NO: 863 - RNA, 23 nt, synthetic construct
  source 1..23: mol_type = other RNA
tatcaggaagtgtgtgtctgaag

SEQ ID NO: 864 - RNA, 23 nt, synthetic construct
  source 1..23: mol_type = other RNA
tattgggaaacactgaatcagga

SEQ ID NO: 865 - RNA, 23 nt, synthetic construct
  source 1..23: mol_type = other RNA
tcatgacgtgctttgcagtctaa

SEQ ID NO: 866 - RNA, 23 nt, synthetic construct
  source 1..23: mol_type = other RNA
tacatggagttctcaatcccagc

SEQ ID NO: 867 - RNA, 23 nt, synthetic construct
  source 1..23: mol_type = other RNA
tctaagatacagagcaacatgga

SEQ ID NO: 868 - RNA, 23 nt, synthetic construct
  source 1..23: mol_type = other RNA
tcctacgtatataagcctaagat

SEQ ID NO: 869 - RNA, 23 nt, synthetic construct
  source 1..23: mol_type = other RNA
taaatatacactttgtactgctt

SEQ ID NO: 870 - RNA, 23 nt, synthetic construct
  source 1..23: mol_type = other RNA
tgatgctgttacctgttacctgt

SEQ ID NO: 871 - RNA, 23 nt, synthetic construct
  source 1..23: mol_type = other RNA
tagtaattggattagcgatgctg

SEQ ID NO: 872 - RNA, 23 nt, synthetic construct
  source 1..23: mol_type = other RNA
tagtgtctgagtgtctccgttta

SEQ ID NO: 873 - RNA, 23 nt, synthetic construct
  source 1..23: mol_type = other RNA
taaaactattagtcataaaaaga

SEQ ID NO: 874 - RNA, 23 nt, synthetic construct
  source 1..23: mol_type = other RNA
taaaggatttttattttagtatt

SEQ ID NO: 875 - RNA, 23 nt, synthetic construct
  source 1..23: mol_type = other RNA
tgagttggctaaatcgaaaggat

SEQ ID NO: 876 - RNA, 23 nt, synthetic construct
  source 1..23: mol_type = other RNA
taaagggtgtattcctagcctac

SEQ ID NO: 877 - RNA, 23 nt, synthetic construct
  source 1..23: mol_type = other RNA
tagtgtgttaatttaaaaagggt

SEQ ID NO: 878 - RNA, 23 nt, synthetic construct
  source 1..23: mol_type = other RNA
taaaaaaaggatctacagtgtgt

SEQ ID NO: 879 - RNA, 23 nt, synthetic construct
  source 1..23: mol_type = other RNA
tggaatgttaaaacagaaaaaaa

SEQ ID NO: 880 - RNA, 23 nt, synthetic construct
  source 1..23: mol_type = other RNA
taatgggggagttagaggaatgt

SEQ ID NO: 881 - RNA, 23 nt, synthetic construct
  source 1..23: mol_type = other RNA
tatgaactcttaggctgcaaaaa

SEQ ID NO: 882 - RNA, 23 nt, synthetic construct
  source 1..23: mol_type = other RNA
tgtttatttttaaataatgaact

SEQ ID NO: 883 - RNA, 23 nt, synthetic construct
  source 1..23: mol_type = other RNA
ttgacatatttctttagtttatt

SEQ ID NO: 884 - RNA, 23 nt, synthetic construct
  source 1..23: mol_type = other RNA
taaggcagaacaaaggtgacata

SEQ ID NO: 885 - RNA, 23 nt, synthetic construct
  source 1..23: mol_type = other RNA
taactctcttaagaccaaggcag

SEQ ID NO: 886 - RNA, 23 nt, synthetic construct
  source 1..23: mol_type = other RNA
tcagaaccataaaacttgtttct

SEQ ID NO: 887 - RNA, 23 nt, synthetic construct
  source 1..23: mol_type = other RNA
ttgaaacaaatgaaaacagaacc

SEQ ID NO: 888 - RNA, 23 nt, synthetic construct
  source 1..23: mol_type = other RNA
tctgaatttcaaaaaatgaaaca

SEQ ID NO: 889 - RNA, 23 nt, synthetic construct
  source 1..23: mol_type = other RNA
taaaataaatcctcttttgcatt

SEQ ID NO: 890 - RNA, 23 nt, synthetic construct
  source 1..23: mol_type = other RNA
taaagagctgacttatctaccta

SEQ ID NO: 891 - RNA, 23 nt, synthetic construct
  source 1..23: mol_type = other RNA
ttaagtaaaacattcaaaagagc

SEQ ID NO: 892 - RNA, 23 nt, synthetic construct
  source 1..23: mol_type = other RNA
tgaactcaggcaaaaataagtaa

SEQ ID NO: 893 - RNA, 23 nt, synthetic construct
  source 1..23: mol_type = other RNA
tgaaaatattcctagtaatgcgt

SEQ ID NO: 894 - RNA, 23 nt, synthetic construct
  source 1..23: mol_type = other RNA
taatgttctcccctacctaaccc

SEQ ID NO: 895 - RNA, 23 nt, synthetic construct
  source 1..23: mol_type = other RNA
tgaaataaggatggatttgtagc

SEQ ID NO: 896 - RNA, 23 nt, synthetic construct
  source 1..23: mol_type = other RNA
tttcagcactgaataagaaataa

SEQ ID NO: 897 - RNA, 23 nt, synthetic construct
  source 1..23: mol_type = other RNA
tagccacaccaatattttgcatg

SEQ ID NO: 898 - RNA, 23 nt, synthetic construct
  source 1..23: mol_type = other RNA
taaaaatgaagatgttatggtaa

SEQ ID NO: 899 - RNA, 23 nt, synthetic construct
  source 1..23: mol_type = other RNA
tggcaatgaaatgaggaaaaatg

SEQ ID NO: 900 - RNA, 23 nt, synthetic construct
  source 1..23: mol_type = other RNA
tgaaaactgtatgagaggcaatg

SEQ ID NO: 901 - RNA, 23 nt, synthetic construct
  source 1..23: mol_type = other RNA
taataaatcagagggagaaaact

SEQ ID NO: 902 - RNA, 23 nt, synthetic construct
  source 1..23: mol_type = other RNA
ttacttaattcaaaatccactac

SEQ ID NO: 903 - RNA, 23 nt, synthetic construct
  source 1..23: mol_type = other RNA
tatcaaatagtcacttgcaaaga

SEQ ID NO: 904 - RNA, 23 nt, synthetic construct
  source 1..23: mol_type = other RNA
tatttttaatgtgttaatcaaat

SEQ ID NO: 905 - RNA, 23 nt, synthetic construct
  source 1..23: mol_type = other RNA
tggaaatttttaaaaaattttta

SEQ ID NO: 906 - RNA, 23 nt, synthetic construct
  source 1..23: mol_type = other RNA
tatcataacttaaaggggaaatt

SEQ ID NO: 907 - RNA, 23 nt, synthetic construct
  source 1..23: mol_type = other RNA
tattctataggcagccatcataa

SEQ ID NO: 908 - RNA, 23 nt, synthetic construct
  source 1..23: mol_type = other RNA
ttgagaaacagtctaaattctat

SEQ ID NO: 909 - RNA, 23 nt, synthetic construct
  source 1..23: mol_type = other RNA
tctaataacataatatcaggatg

SEQ ID NO: 910 - RNA, 23 nt, synthetic construct
  source 1..23: mol_type = other RNA
taccttgaaatcgtagctaataa

SEQ ID NO: 911 - RNA, 23 nt, synthetic construct
  source 1..23: mol_type = other RNA
ttctgacttcaaagtgaccttga

SEQ ID NO: 912 - RNA, 23 nt, synthetic construct
  source 1..23: mol_type = other RNA
ttagaaaactgtgaagtctgact

SEQ ID NO: 913 - RNA, 23 nt, synthetic construct
  source 1..23: mol_type = other RNA
tcaagaaatacacctgtagaaaa

SEQ ID NO: 914 - RNA, 23 nt, synthetic construct
  source 1..23: mol_type = other RNA
tttcccactgagcatagcaagaa

SEQ ID NO: 915 - RNA, 23 nt, synthetic construct
  source 1..23: mol_type = other RNA
tatcttttctgctccctggttcc

SEQ ID NO: 916 - RNA, 23 nt, synthetic construct
  source 1..23: mol_type = other RNA
tttcccactttccacaatctttt

SEQ ID NO: 917 - RNA, 23 nt, synthetic construct
  source 1..23: mol_type = other RNA
tacgtgacaattaatgttcccac

SEQ ID NO: 918 - RNA, 23 nt, synthetic construct
  source 1..23: mol_type = other RNA
tctcaacagccacgtgacaatta

SEQ ID NO: 919 - RNA, 23 nt, synthetic construct
  source 1..23: mol_type = other RNA
taacttggctggtaagaggcatg

SEQ ID NO: 920 - RNA, 23 nt, synthetic construct
  source 1..23: mol_type = other RNA
tactctaaccatttaaaacttgg

SEQ ID NO: 921 - RNA, 23 nt, synthetic construct
  source 1..23: mol_type = other RNA
tatcaatgccaatgccactctaa

SEQ ID NO: 922 - RNA, 23 nt, synthetic construct
  source 1..23: mol_type = other RNA
tcaagagaaaagcaaaatcaatg

SEQ ID NO: 923 - RNA, 23 nt, synthetic construct
  source 1..23: mol_type = other RNA
tgaaatgaagaaaacccaagaga

SEQ ID NO: 924 - RNA, 23 nt, synthetic construct
  source 1..23: mol_type = other RNA
tgatgaattatgaaaagaaatga

SEQ ID NO: 925 - RNA, 23 nt, synthetic construct
  source 1..23: mol_type = other RNA
tgatctatagcttgaagatgaat

SEQ ID NO: 926 - RNA, 23 nt, synthetic construct
  source 1..23: mol_type = other RNA
ttagggaagaaggatggatctat

SEQ ID NO: 927 - RNA, 23 nt, synthetic construct
  source 1..23: mol_type = other RNA
taacaaagtatttggatagggaa

SEQ ID NO: 928 - RNA, 23 nt, synthetic construct
  source 1..23: mol_type = other RNA
taagccaaaaaaatctgactgcc

SEQ ID NO: 929 - RNA, 23 nt, synthetic construct
  source 1..23: mol_type = other RNA
ttcagtgaggtttggaagccaaa

SEQ ID NO: 930 - RNA, 23 nt, synthetic construct
  source 1..23: mol_type = other RNA
tattctctgaacatgctcagtga

SEQ ID NO: 931 - RNA, 23 nt, synthetic construct
  source 1..23: mol_type = other RNA
tatacatcagacaattgtgggga

SEQ ID NO: 932 - RNA, 23 nt, synthetic construct
  source 1..23: mol_type = other RNA
tcttctgagaggactcatacatc

SEQ ID NO: 933 - RNA, 23 nt, synthetic construct
  source 1..23: mol_type = other RNA
ttagtatgcacttgtgcttctga

SEQ ID NO: 934 - RNA, 23 nt, synthetic construct
  source 1..23: mol_type = other RNA
ttttacaaagccttcctagtatg

SEQ ID NO: 935 - RNA, 23 nt, synthetic construct
  source 1..23: mol_type = other RNA
ttgcctacaaaaccagtttacaa

SEQ ID NO: 936 - RNA, 23 nt, synthetic construct
  source 1..23: mol_type = other RNA
ttgcctatttgcaggtacagcct

SEQ ID NO: 937 - RNA, 23 nt, synthetic construct
  source 1..23: mol_type = other RNA
tgatccttgctcagaatgcctat

SEQ ID NO: 938 - RNA, 23 nt, synthetic construct
  source 1..23: mol_type = other RNA
tcaaagggaaatttaggatcctt

SEQ ID NO: 939 - RNA, 23 nt, synthetic construct
  source 1..23: mol_type = other RNA
tggacatgagccaaagggaaatt

SEQ ID NO: 940 - RNA, 23 nt, synthetic construct
  source 1..23: mol_type = other RNA
tcatgccaaaaaggagaaggtgg

SEQ ID NO: 941 - RNA, 23 nt, synthetic construct
  source 1..23: mol_type = other RNA
ttagcttttcaccagacatgcca

SEQ ID NO: 942 - RNA, 23 nt, synthetic construct
  source 1..23: mol_type = other RNA
tccctgtgaaccttgtagctttt

SEQ ID NO: 943 - RNA, 23 nt, synthetic construct
  source 1..23: mol_type = other RNA
tagggagaatatttggccctgtg

SEQ ID NO: 944 - RNA, 23 nt, synthetic construct
  source 1..23: mol_type = other RNA
ttgtttagagaacaaaagggaga

SEQ ID NO: 945 - RNA, 23 nt, synthetic construct
  source 1..23: mol_type = other RNA
ttttatgtgtgcaacatgtttag

SEQ ID NO: 946 - RNA, 23 nt, synthetic construct
  source 1..23: mol_type = other RNA
taatcactcccttgagtttatgt

SEQ ID NO: 947 - RNA, 23 nt, synthetic construct
  source 1..23: mol_type = other RNA
tggacttaggaaccgaaatcact

SEQ ID NO: 948 - RNA, 23 nt, synthetic construct
  source 1..23: mol_type = other RNA
tgaatagaactccctaggactta

SEQ ID NO: 949 - RNA, 23 nt, synthetic construct
  source 1..23: mol_type = other RNA
tacatcagaataaatggaataga

SEQ ID NO: 950 - RNA, 23 nt, synthetic construct
  source 1..23: mol_type = other RNA
ttcctccttaaaagggacatcag

SEQ ID NO: 951 - RNA, 23 nt, synthetic construct
  source 1..23: mol_type = other RNA
tcacttcaacaccaactcctcct

SEQ ID NO: 952 - RNA, 23 nt, synthetic construct
  source 1..23: mol_type = other RNA
tccttaggtgcaattttggatga

SEQ ID NO: 953 - RNA, 23 nt, synthetic construct
  source 1..23: mol_type = other RNA
tactaagcgaacaattttgtcta

SEQ ID NO: 954 - RNA, 23 nt, synthetic construct
  source 1..23: mol_type = other RNA
taaaatatttctgattagagatc

SEQ ID NO: 955 - RNA, 23 nt, synthetic construct
  source 1..23: mol_type = other RNA
tctgaagtaacactatcaagatg

SEQ ID NO: 956 - RNA, 23 nt, synthetic construct
  source 1..23: mol_type = other RNA
ttcagtcagtcatatgctgaagt

SEQ ID NO: 957 - RNA, 23 nt, synthetic construct
  source 1..23: mol_type = other RNA
tactcccttcataaaatcagtca

SEQ ID NO: 958 - RNA, 23 nt, synthetic construct
  source 1..23: mol_type = other RNA
tggaaaagtcagctaaactccct

SEQ ID NO: 959 - RNA, 23 nt, synthetic construct
  source 1..23: mol_type = other RNA
tctttttgtttttaatatgatag

SEQ ID NO: 960 - RNA, 23 nt, synthetic construct
  source 1..23: mol_type = other RNA
tctttgtccttgctgcttcaagt

SEQ ID NO: 961 - RNA, 23 nt, synthetic construct
  source 1..23: mol_type = other RNA
ttacaataataatccttttccac

SEQ ID NO: 962 - RNA, 23 nt, synthetic construct
  source 1..23: mol_type = other RNA
tagaactgctattatgtacaata

SEQ ID NO: 963 - RNA, 23 nt, synthetic construct
  source 1..23: mol_type = other RNA
tattggaattccagccagaactg

SEQ ID NO: 964 - RNA, 23 nt, synthetic construct
  source 1..23: mol_type = other RNA
tatccccagaaagtggattggaa

SEQ ID NO: 965 - RNA, 23 nt, synthetic construct
  source 1..23: mol_type = other RNA
tttcaacatcaaaatgatcccca

SEQ ID NO: 966 - RNA, 23 nt, synthetic construct
  source 1..23: mol_type = other RNA
ttgctttgggggaacattcaaca

SEQ ID NO: 967 - RNA, 23 nt, synthetic construct
  source 1..23: mol_type = other RNA
tccaaacttgtcagaatgctttg

SEQ ID NO: 968 - RNA, 23 nt, synthetic construct
  source 1..23: mol_type = other RNA
taaagtcaataagggtcttatta

SEQ ID NO: 969 - RNA, 23 nt, synthetic construct
  source 1..23: mol_type = other RNA
tatttcttaagctcatttatgcc

SEQ ID NO: 970 - RNA, 23 nt, synthetic construct
  source 1..23: mol_type = other RNA
tgactgtatacaatggatttctt

SEQ ID NO: 971 - RNA, 23 nt, synthetic construct
  source 1..23: mol_type = other RNA
tgaaggcaaacactaggactgta

SEQ ID NO: 972 - RNA, 23 nt, synthetic construct
  source 1..23: mol_type = other RNA
tatgtaattttaccaagaaggca

SEQ ID NO: 973 - RNA, 23 nt, synthetic construct
  source 1..23: mol_type = other RNA
taaatgacatccttaaatgtaat

SEQ ID NO: 974 - RNA, 23 nt, synthetic construct
  source 1..23: mol_type = other RNA
tacatctcaatacacttcagtgt

SEQ ID NO: 975 - RNA, 23 nt, synthetic construct
  source 1..23: mol_type = other RNA
tttaaactaaagaacaacatctc

SEQ ID NO: 976 - RNA, 23 nt, synthetic construct
  source 1..23: mol_type = other RNA
tatcccctttgaatattactttg

SEQ ID NO: 977 - RNA, 23 nt, synthetic construct
  source 1..23: mol_type = other RNA
tcccccaaacatcccctttgaat

SEQ ID NO: 978 - RNA, 23 nt, synthetic construct
  source 1..23: mol_type = other RNA
ttcaatataaagccacccggtcc

SEQ ID NO: 979 - RNA, 23 nt, synthetic construct
  source 1..23: mol_type = other RNA
ttggaatatttcattatcaatat

SEQ ID NO: 980 - RNA, 23 nt, synthetic construct
  source 1..23: mol_type = other RNA
tcaatgtgttttgctctggaata

SEQ ID NO: 981 - RNA, 23 nt, synthetic construct
  source 1..23: mol_type = other RNA
tacaacttcattaggacaatgtg

SEQ ID NO: 982 - RNA, 23 nt, synthetic construct
  source 1..23: mol_type = other RNA
tacgaagagagctgcaacaactt

SEQ ID NO: 983 - RNA, 23 nt, synthetic construct
  source 1..23: mol_type = other RNA
tgcggcacaagaaaacgaagaga

SEQ ID NO: 984 - RNA, 23 nt, synthetic construct
  source 1..23: mol_type = other RNA
tcaattccagcggcacaagaaaa

SEQ ID NO: 985 - RNA, 23 nt, synthetic construct
  source 1..23: mol_type = other RNA
tagtgacccacaagccaattcca

SEQ ID NO: 986 - RNA, 23 nt, synthetic construct
  source 1..23: mol_type = other RNA
ttatttgaaattaattcactttt

SEQ ID NO: 987 - RNA, 23 nt, synthetic construct
  source 1..23: mol_type = other RNA
taagcaatatgattcctatttga

SEQ ID NO: 988 - RNA, 23 nt, synthetic construct
  source 1..23: mol_type = other RNA
tacaaggtggtaaattttctttg

SEQ ID NO: 989 - RNA, 23 nt, synthetic construct
  source 1..23: mol_type = other RNA
tcaatctatgtatcagacaaggt

SEQ ID NO: 990 - RNA, 23 nt, synthetic construct
  source 1..23: mol_type = other RNA
ttcaagatcaggtgtttgtgggt

SEQ ID NO: 991 - RNA, 23 nt, synthetic construct
  source 1..23: mol_type = other RNA
ttacaatgctttccaatcaagat

SEQ ID NO: 992 - RNA, 23 nt, synthetic construct
  source 1..23: mol_type = other RNA
tttttccctaatgacctacaatg

SEQ ID NO: 993 - RNA, 23 nt, synthetic construct
  source 1..23: mol_type = other RNA
tagtcagcatcatcagttttccc

SEQ ID NO: 994 - RNA, 23 nt, synthetic construct
  source 1..23: mol_type = other RNA
tattgccaacacagctggagcaa

SEQ ID NO: 995 - RNA, 23 nt, synthetic construct
  source 1..23: mol_type = other RNA
tacaaggtcatcttgaattgcca

SEQ ID NO: 996 - RNA, 23 nt, synthetic construct
  source 1..23: mol_type = other RNA
taactttcagttagtaacaaggt

SEQ ID NO: 997 - RNA, 23 nt, synthetic construct
  source 1..23: mol_type = other RNA
tttagctggtttgtttgctaagg

SEQ ID NO: 998 - RNA, 23 nt, synthetic construct
  source 1..23: mol_type = other RNA
tagtgctgtaatggtgttagctg

SEQ ID NO: 999 - RNA, 23 nt, synthetic construct
  source 1..23: mol_type = other RNA
taaaatctacttaaccagtgctg

SEQ ID NO: 1000 - RNA, 23 nt, synthetic construct
  source 1..23: mol_type = other RNA
tcagccagtgccagtaaaaatct

SEQ ID NO: 1001 - RNA, 23 nt, synthetic construct
  source 1..23: mol_type = other RNA
tgtcattaaagtctgtatcctag

SEQ ID NO: 1002 - RNA, 23 nt, synthetic construct
  source 1..23: mol_type = other RNA
tctagtctggctcttggtcatta

SEQ ID NO: 1003 - RNA, 23 nt, synthetic construct
  source 1..23: mol_type = other RNA
tgaggtatttgttgctgatttct

SEQ ID NO: 1004 - RNA, 23 nt, synthetic construct
  source 1..23: mol_type = other RNA
tttcaaatagcacaaggaggtat

SEQ ID NO: 1005 - RNA, 23 nt, synthetic construct
  source 1..23: mol_type = other RNA
tactaataccttagcattcaaat

SEQ ID NO: 1006 - RNA, 23 nt, synthetic construct
  source 1..23: mol_type = other RNA
tcgtaagcctattgcaactaata

SEQ ID NO: 1007 - RNA, 23 nt, synthetic construct
  source 1..23: mol_type = other RNA
taaggcgtaagcctattgcaact

SEQ ID NO: 1008 - RNA, 23 nt, synthetic construct
  source 1..23: mol_type = other RNA
ttagtgtcatcaggctcattccc

SEQ ID NO: 1009 - RNA, 23 nt, synthetic construct
  source 1..23: mol_type = other RNA
tacaggtaaacagtaatagtgtc

SEQ ID NO: 1010 - RNA, 23 nt, synthetic construct
  source 1..23: mol_type = other RNA
tcagagactgcttaatgagacat

SEQ ID NO: 1011 - RNA, 23 nt, synthetic construct
  source 1..23: mol_type = other RNA
ttacagatcagcatatacaacaa

SEQ ID NO: 1012 - RNA, 23 nt, synthetic construct
  source 1..23: mol_type = other RNA
taaaatgtacataacatacagat

SEQ ID NO: 1013 - RNA, 23 nt, synthetic construct
  source 1..23: mol_type = other RNA
tattcttttttgtcttttttctt

SEQ ID NO: 1014 - RNA, 23 nt, synthetic construct
  source 1..23: mol_type = other RNA
taaatagacagtggtgattcttt

SEQ ID NO: 1015 - RNA, 23 nt, synthetic construct
  source 1..23: mol_type = other RNA
ttttatcatcttcataaaataga

SEQ ID NO: 1016 - RNA, 23 nt, synthetic construct
  source 1..23: mol_type = other RNA
tatttaataaagctgctttatca

SEQ ID NO: 1017 - RNA, 23 nt, synthetic construct
  source 1..23: mol_type = other RNA
taacataactgtaataatttaat

SEQ ID NO: 1018 - RNA, 23 nt, synthetic construct
  source 1..23: mol_type = other RNA
tgataacaccatttgaaacataa

SEQ ID NO: 1019 - RNA, 23 nt, synthetic construct
  source 1..23: mol_type = other RNA
tggaaacaatgtggcagataaca

SEQ ID NO: 1020 - RNA, 23 nt, synthetic construct
  source 1..23: mol_type = other RNA
taaccaccagataaaaggaaaca

SEQ ID NO: 1021 - RNA, 23 nt, synthetic construct
  source 1..23: mol_type = other RNA
tggaaacagagaaccaccagata

SEQ ID NO: 1022 - RNA, 23 nt, synthetic construct
  source 1..23: mol_type = other RNA
taacacatttaaagggggaaaca

SEQ ID NO: 1023 - RNA, 23 nt, synthetic construct
  source 1..23: mol_type = other RNA
ttaaaatgcattaaatttttgaa

SEQ ID NO: 1024 - RNA, 23 nt, synthetic construct
  source 1..23: mol_type = other RNA
tcagaccactgaaaggcaggaaa

SEQ ID NO: 1025 - RNA, 23 nt, synthetic construct
  source 1..23: mol_type = other RNA
taccccatccctactgccttacc

SEQ ID NO: 1026 - RNA, 23 nt, synthetic construct
  source 1..23: mol_type = other RNA
tcaaaaaggagaaggtggggtgg

SEQ ID NO: 1027 - RNA, 23 nt, synthetic construct
  source 1..23: mol_type = other RNA
tccagccccacccccaaacatcc

SEQ ID NO: 1028 - RNA, 23 nt, synthetic construct
  source 1..23: mol_type = other RNA
tgctcattcccctcactagagga

SEQ ID NO: 1029 - RNA, 21 nt, synthetic construct
  source 1..21: mol_type = other RNA
ctgagcgatttcatccgaaaa

SEQ ID NO: 1030 - RNA, 21 nt, synthetic construct
  source 1..21: mol_type = other RNA
cgaaatcctaaacctcctaca

SEQ ID NO: 1031 - RNA, 21 nt, synthetic construct
  source 1..21: mol_type = other RNA
acctcctaccccaaacccata

SEQ ID NO: 1032 - RNA, 21 nt, synthetic construct
  source 1..21: mol_type = other RNA
acagacagagaaagcgagaca

SEQ ID NO: 1033 - RNA, 21 nt, synthetic construct
  source 1..21: mol_type = other RNA
agacagagaaagcgagacaga

SEQ ID NO: 1034 - RNA, 21 nt, synthetic construct
  source 1..21: mol_type = other RNA
tctccgggaagatgaaatcaa

SEQ ID NO: 1035 - RNA, 21 nt, synthetic construct
  source 1..21: mol_type = other RNA
aatcaagacgctcctgcaaga

SEQ ID NO: 1036 - RNA, 21 nt, synthetic construct
  source 1..21: mol_type = other RNA
acgctcctgcaagtaaactta

SEQ ID NO: 1037 - RNA, 21 nt, synthetic construct
  source 1..21: mol_type = other RNA
aacttcggcggcgacaaaata

SEQ ID NO: 1038 - RNA, 21 nt, synthetic construct
  source 1..21: mol_type = other RNA
ttagaaagaccggggctttga

SEQ ID NO: 1039 - RNA, 21 nt, synthetic construct
  source 1..21: mol_type = other RNA
ctttgattttcttggacaaaa

SEQ ID NO: 1040 - RNA, 21 nt, synthetic construct
  source 1..21: mol_type = other RNA
ttggacaaattgccatctcca

SEQ ID NO: 1041 - RNA, 21 nt, synthetic construct
  source 1..21: mol_type = other RNA
tctccccgtttccacaaacta

SEQ ID NO: 1042 - RNA, 21 nt, synthetic construct
  source 1..21: mol_type = other RNA
tccacaaacttgacgtggaga

SEQ ID NO: 1043 - RNA, 21 nt, synthetic construct
  source 1..21: mol_type = other RNA
tcggactgcgttgttaactta

SEQ ID NO: 1044 - RNA, 21 nt, synthetic construct
  source 1..21: mol_type = other RNA
aactttgatttcctagacgaa

SEQ ID NO: 1045 - RNA, 21 nt, synthetic construct
  source 1..21: mol_type = other RNA
atttcctagacgaaaacgcca

SEQ ID NO: 1046 - RNA, 21 nt, synthetic construct
  source 1..21: mol_type = other RNA
tctttaccttcgcctcaagta

SEQ ID NO: 1047 - RNA, 21 nt, synthetic construct
  source 1..21: mol_type = other RNA
accttcgcctcaagtactgta

SEQ ID NO: 1048 - RNA, 21 nt, synthetic construct
  source 1..21: mol_type = other RNA
ggctaactttgaaggggtaaa

SEQ ID NO: 1049 - RNA, 21 nt, synthetic construct
  source 1..21: mol_type = other RNA
aaggggtaaaactgagtagca

SEQ ID NO: 1050 - RNA, 21 nt, synthetic construct
  source 1..21: mol_type = other RNA
ccgccctcattaatctcaaga

SEQ ID NO: 1051 - RNA, 21 nt, synthetic construct
  source 1..21: mol_type = other RNA
tcaagtactcggtagaagaga

SEQ ID NO: 1052 - RNA, 21 nt, synthetic construct
  source 1..21: mol_type = other RNA
gtactcggtagaagaggagca

SEQ ID NO: 1053 - RNA, 21 nt, synthetic construct
  source 1..21: mol_type = other RNA
ccacacctagtggacatcaaa

SEQ ID NO: 1054 - RNA, 21 nt, synthetic construct
  source 1..21: mol_type = other RNA
gtggacatcaatcccagctca

SEQ ID NO: 1055 - RNA, 21 nt, synthetic construct
  source 1..21: mol_type = other RNA
ctggtcaccaagcagaagata

SEQ ID NO: 1056 - RNA, 21 nt, synthetic construct
  source 1..21: mol_type = other RNA
aagattgaccgtgatctgcta

SEQ ID NO: 1057 - RNA, 21 nt, synthetic construct
  source 1..21: mol_type = other RNA
gattgaccgtgatctgctgta

SEQ ID NO: 1058 - RNA, 21 nt, synthetic construct
  source 1..21: mol_type = other RNA
gtcatgtccagctcaatggaa

SEQ ID NO: 1059 - RNA, 21 nt, synthetic construct
  source 1..21: mol_type = other RNA
atggaaatctgcgtgataaaa

SEQ ID NO: 1060 - RNA, 21 nt, synthetic construct
  source 1..21: mol_type = other RNA
ataaaggtggagatcaaggaa

SEQ ID NO: 1061 - RNA, 21 nt, synthetic construct
  source 1..21: mol_type = other RNA
caaggacctgaacgacaatga

SEQ ID NO: 1062 - RNA, 21 nt, synthetic construct
  source 1..21: mol_type = other RNA
acgatccagactcaggaagca

SEQ ID NO: 1063 - RNA, 21 nt, synthetic construct
  source 1..21: mol_type = other RNA
gatccagactcaggaagctta

SEQ ID NO: 1064 - RNA, 21 nt, synthetic construct
  source 1..21: mol_type = other RNA
tgccgaactcgtggtggaaaa

SEQ ID NO: 1065 - RNA, 21 nt, synthetic construct
  source 1..21: mol_type = other RNA
cgttggccttagtatcaagga

SEQ ID NO: 1066 - RNA, 21 nt, synthetic construct
  source 1..21: mol_type = other RNA
caaggtgaccgactccaatga

SEQ ID NO: 1067 - RNA, 21 nt, synthetic construct
  source 1..21: mol_type = other RNA
caatgacaacaacccggtgta

SEQ ID NO: 1068 - RNA, 21 nt, synthetic construct
  source 1..21: mol_type = other RNA
gacaacaacccggtgtttaga

SEQ ID NO: 1069 - RNA, 21 nt, synthetic construct
  source 1..21: mol_type = other RNA
ggtctactccttctatggcta

SEQ ID NO: 1070 - RNA, 21 nt, synthetic construct
  source 1..21: mol_type = other RNA
cttctatggctacgtcaacga

SEQ ID NO: 1071 - RNA, 21 nt, synthetic construct
  source 1..21: mol_type = other RNA
tgtcactggcgctttagacta

SEQ ID NO: 1072 - RNA, 21 nt, synthetic construct
  source 1..21: mol_type = other RNA
tggcgctttagactacgaaga

SEQ ID NO: 1073 - RNA, 21 nt, synthetic construct
  source 1..21: mol_type = other RNA
tgacaatccgccggtcatcaa

SEQ ID NO: 1074 - RNA, 21 nt, synthetic construct
  source 1..21: mol_type = other RNA
catcaacctgctgtcagtcaa

SEQ ID NO: 1075 - RNA, 21 nt, synthetic construct
  source 1..21: mol_type = other RNA
agtcaacagtgagcttgtgga

SEQ ID NO: 1076 - RNA, 21 nt, synthetic construct
  source 1..21: mol_type = other RNA
ccctttcgactgcaggaataa

SEQ ID NO: 1077 - RNA, 21 nt, synthetic construct
  source 1..21: mol_type = other RNA
gaatatgagagcttctccaca

SEQ ID NO: 1078 - RNA, 21 nt, synthetic construct
  source 1..21: mol_type = other RNA
cttctccactattctggtgga

SEQ ID NO: 1079 - RNA, 21 nt, synthetic construct
  source 1..21: mol_type = other RNA
cacgaccaatacaacctcaca

SEQ ID NO: 1080 - RNA, 21 nt, synthetic construct
  source 1..21: mol_type = other RNA
caacctcacaattcaggcaca

SEQ ID NO: 1081 - RNA, 21 nt, synthetic construct
  source 1..21: mol_type = other RNA
agtcctttaccgtgctcatca

SEQ ID NO: 1082 - RNA, 21 nt, synthetic construct
  source 1..21: mol_type = other RNA
tcatcactgacgaaaatgaca

SEQ ID NO: 1083 - RNA, 21 nt, synthetic construct
  source 1..21: mol_type = other RNA
atgacaaccacccgcacttta

SEQ ID NO: 1084 - RNA, 21 nt, synthetic construct
  source 1..21: mol_type = other RNA
tgacaaccacccgcactttta

SEQ ID NO: 1085 - RNA, 21 nt, synthetic construct
  source 1..21: mol_type = other RNA
cttttccaagccctactacca

SEQ ID NO: 1086 - RNA, 21 nt, synthetic construct
  source 1..21: mol_type = other RNA
ctaccaggtcattgtgcagga

SEQ ID NO: 1087 - RNA, 21 nt, synthetic construct
  source 1..21: mol_type = other RNA
attgtgcaggagaacaacaca

SEQ ID NO: 1088 - RNA, 21 nt, synthetic construct
  source 1..21: mol_type = other RNA
catgcctgtcttcacctatga

SEQ ID NO: 1089 - RNA, 21 nt, synthetic construct
  source 1..21: mol_type = other RNA
ctatgtctccatcaatcccaa

SEQ ID NO: 1090 - RNA, 21 nt, synthetic construct
  source 1..21: mol_type = other RNA
tcccaactcaggcgacatcta

SEQ ID NO: 1091 - RNA, 21 nt, synthetic construct
  source 1..21: mol_type = other RNA
ctacgcgctgcgatcctttaa

SEQ ID NO: 1092 - RNA, 21 nt, synthetic construct
  source 1..21: mol_type = other RNA
ctttaaccacgagcagaccaa

SEQ ID NO: 1093 - RNA, 21 nt, synthetic construct
  source 1..21: mol_type = other RNA
gaccaaggcgttcgaattcaa

SEQ ID NO: 1094 - RNA, 21 nt, synthetic construct
  source 1..21: mol_type = other RNA
cgaattcaaggtgctggccaa

SEQ ID NO: 1095 - RNA, 21 nt, synthetic construct
  source 1..21: mol_type = other RNA
catcctcgacgtcaacgacaa

SEQ ID NO: 1096 - RNA, 21 nt, synthetic construct
  source 1..21: mol_type = other RNA
cacagccccacctctgattaa

SEQ ID NO: 1097 - RNA, 21 nt, synthetic construct
  source 1..21: mol_type = other RNA
aggctacctggtgactgttga

SEQ ID NO: 1098 - RNA, 21 nt, synthetic construct
  source 1..21: mol_type = other RNA
tgttgtcaaggcagaagacta

SEQ ID NO: 1099 - RNA, 21 nt, synthetic construct
  source 1..21: mol_type = other RNA
agactacgatgagggcgaaaa

SEQ ID NO: 1100 - RNA, 21 nt, synthetic construct
  source 1..21: mol_type = other RNA
actacgatgagggcgaaaata

SEQ ID NO: 1101 - RNA, 21 nt, synthetic construct
  source 1..21: mol_type = other RNA
ccgcggcttctttgaaataga

SEQ ID NO: 1102 - RNA, 21 nt, synthetic construct
  source 1..21: mol_type = other RNA
aatagaccaggtcaatggcga

SEQ ID NO: 1103 - RNA, 21 nt, synthetic construct
  source 1..21: mol_type = other RNA
agaccaggtcaatggcgaaga

SEQ ID NO: 1104 - RNA, 21 nt, synthetic construct
  source 1..21: mol_type = other RNA
ccaagtcctcctatgagctta

SEQ ID NO: 1105 - RNA, 21 nt, synthetic construct
  source 1..21: mol_type = other RNA
tgagcttatcgtggtggctca

SEQ ID NO: 1106 - RNA, 21 nt, synthetic construct
  source 1..21: mol_type = other RNA
ctgctctcgtcctaatctaca

SEQ ID NO: 1107 - RNA, 21 nt, synthetic construct
  source 1..21: mol_type = other RNA
atctacttgtcccctgctcta

SEQ ID NO: 1108 - RNA, 21 nt, synthetic construct
  source 1..21: mol_type = other RNA
agagtcaatgggctctgtgaa

SEQ ID NO: 1109 - RNA, 21 nt, synthetic construct
  source 1..21: mol_type = other RNA
tgtgaacttgtccttgattta

SEQ ID NO: 1110 - RNA, 21 nt, synthetic construct
  source 1..21: mol_type = other RNA
gattttcattattgccctgga

SEQ ID NO: 1111 - RNA, 21 nt, synthetic construct
  source 1..21: mol_type = other RNA
attattgccctgggctccata

SEQ ID NO: 1112 - RNA, 21 nt, synthetic construct
  source 1..21: mol_type = other RNA
ttgcgggcatcctctttgtaa

SEQ ID NO: 1113 - RNA, 21 nt, synthetic construct
  source 1..21: mol_type = other RNA
ttgtaactatgatcttcgtga

SEQ ID NO: 1114 - RNA, 21 nt, synthetic construct
  source 1..21: mol_type = other RNA
ttcgtggcaatcaagtgcaaa

SEQ ID NO: 1115 - RNA, 21 nt, synthetic construct
  source 1..21: mol_type = other RNA
tgcaagcgagacaacaaagaa

SEQ ID NO: 1116 - RNA, 21 nt, synthetic construct
  source 1..21: mol_type = other RNA
aaagagatccggacctacaaa

SEQ ID NO: 1117 - RNA, 21 nt, synthetic construct
  source 1..21: mol_type = other RNA
tacaactgcagtaattgttta

SEQ ID NO: 1118 - RNA, 21 nt, synthetic construct
  source 1..21: mol_type = other RNA
tgtttaaccatcacttgtcta

SEQ ID NO: 1119 - RNA, 21 nt, synthetic construct
  source 1..21: mol_type = other RNA
tgtctcctcggctgttttata

SEQ ID NO: 1120 - RNA, 21 nt, synthetic construct
  source 1..21: mol_type = other RNA
tttataaaaggacaaaacaga

SEQ ID NO: 1121 - RNA, 21 nt, synthetic construct
  source 1..21: mol_type = other RNA
aacagcaagtgtctgcattga

SEQ ID NO: 1122 - RNA, 21 nt, synthetic construct
  source 1..21: mol_type = other RNA
tgcattgcatctcggtttcta

SEQ ID NO: 1123 - RNA, 21 nt, synthetic construct
  source 1..21: mol_type = other RNA
ctcggtttctcccattagcga

SEQ ID NO: 1124 - RNA, 21 nt, synthetic construct
  source 1..21: mol_type = other RNA
tagcgaggagcaagacaaaaa

SEQ ID NO: 1125 - RNA, 21 nt, synthetic construct
  source 1..21: mol_type = other RNA
caaaaagacagaggagaaaga

SEQ ID NO: 1126 - RNA, 21 nt, synthetic construct
  source 1..21: mol_type = other RNA
gaaagtgagcctaaggggaaa

SEQ ID NO: 1127 - RNA, 21 nt, synthetic construct
  source 1..21: mol_type = other RNA
gggaaagagaattgctgagta

SEQ ID NO: 1128 - RNA, 21 nt, synthetic construct
  source 1..21: mol_type = other RNA
gctgagtactcctatgggcaa

SEQ ID NO: 1129 - RNA, 21 nt, synthetic construct
  source 1..21: mol_type = other RNA
gggcatcaaaagaaatcaaga

SEQ ID NO: 1130 - RNA, 21 nt, synthetic construct
  source 1..21: mol_type = other RNA
tcaagcaagaagaaaaaaata

SEQ ID NO: 1131 - RNA, 21 nt, synthetic construct
  source 1..21: mol_type = other RNA
aaaatcagtaagaatgacata

SEQ ID NO: 1132 - RNA, 21 nt, synthetic construct
  source 1..21: mol_type = other RNA
agaatgacatccgcctggtaa

SEQ ID NO: 1133 - RNA, 21 nt, synthetic construct
  source 1..21: mol_type = other RNA
tgtggaggagacagacaagaa

SEQ ID NO: 1134 - RNA, 21 nt, synthetic construct
  source 1..21: mol_type = other RNA
caagatgaacgttgtcagtta

SEQ ID NO: 1135 - RNA, 21 nt, synthetic construct
  source 1..21: mol_type = other RNA
cgttgtcagttgctcttccca

SEQ ID NO: 1136 - RNA, 21 nt, synthetic construct
  source 1..21: mol_type = other RNA
gacctcctccctcaactatta

SEQ ID NO: 1137 - RNA, 21 nt, synthetic construct
  source 1..21: mol_type = other RNA
ctattttgactaccaccagca

SEQ ID NO: 1138 - RNA, 21 nt, synthetic construct
  source 1..21: mol_type = other RNA
tttgactaccaccagcagaca

SEQ ID NO: 1139 - RNA, 21 nt, synthetic construct
  source 1..21: mol_type = other RNA
tctgagagcactttcctgaaa

SEQ ID NO: 1140 - RNA, 21 nt, synthetic construct
  source 1..21: mol_type = other RNA
ctgaatgtggagaaccagaaa

SEQ ID NO: 1141 - RNA, 21 nt, synthetic construct
  source 1..21: mol_type = other RNA
tgtggagaaccagaataccca

SEQ ID NO: 1142 - RNA, 21 nt, synthetic construct
  source 1..21: mol_type = other RNA
tacccgcaacaccagtgctaa

SEQ ID NO: 1143 - RNA, 21 nt, synthetic construct
  source 1..21: mol_type = other RNA
tgctaaccacatctaccatca

SEQ ID NO: 1144 - RNA, 21 nt, synthetic construct
  source 1..21: mol_type = other RNA
ccatcactctttcaacagcca

SEQ ID NO: 1145 - RNA, 21 nt, synthetic construct
  source 1..21: mol_type = other RNA
catcactctttcaacagccaa

SEQ ID NO: 1146 - RNA, 21 nt, synthetic construct
  source 1..21: mol_type = other RNA
gcagcctgacctgattatcaa

SEQ ID NO: 1147 - RNA, 21 nt, synthetic construct
  source 1..21: mol_type = other RNA
attatcaacggtgtgcctcta

SEQ ID NO: 1148 - RNA, 21 nt, synthetic construct
  source 1..21: mol_type = other RNA
tctgcctgagactgaaaacta

SEQ ID NO: 1149 - RNA, 21 nt, synthetic construct
  source 1..21: mol_type = other RNA
aaactattcttttgactccaa

SEQ ID NO: 1150 - RNA, 21 nt, synthetic construct
  source 1..21: mol_type = other RNA
actccaactacgtgaatagca

SEQ ID NO: 1151 - RNA, 21 nt, synthetic construct
  source 1..21: mol_type = other RNA
atagccgagcccatttaatca

SEQ ID NO: 1152 - RNA, 21 nt, synthetic construct
  source 1..21: mol_type = other RNA
taatcaagagcagctccacca

SEQ ID NO: 1153 - RNA, 21 nt, synthetic construct
  source 1..21: mol_type = other RNA
ctccaccttcaaggacttaga

SEQ ID NO: 1154 - RNA, 21 nt, synthetic construct
  source 1..21: mol_type = other RNA
caaggacttagagggcaacaa

SEQ ID NO: 1155 - RNA, 21 nt, synthetic construct
  source 1..21: mol_type = other RNA
cagcctgaaggatagtggaca

SEQ ID NO: 1156 - RNA, 21 nt, synthetic construct
  source 1..21: mol_type = other RNA
agtggacatgaggagagtgaa

SEQ ID NO: 1157 - RNA, 21 nt, synthetic construct
  source 1..21: mol_type = other RNA
agtgaccaaactgacagtgaa

SEQ ID NO: 1158 - RNA, 21 nt, synthetic construct
  source 1..21: mol_type = other RNA
tgacagtgagcatgatgtcca

SEQ ID NO: 1159 - RNA, 21 nt, synthetic construct
  source 1..21: mol_type = other RNA
cggagcctgtattgtgataca

SEQ ID NO: 1160 - RNA, 21 nt, synthetic construct
  source 1..21: mol_type = other RNA
gatactgctgtcaacgatgta

SEQ ID NO: 1161 - RNA, 21 nt, synthetic construct
  source 1..21: mol_type = other RNA
cgatgtgctgaacaccagtga

SEQ ID NO: 1162 - RNA, 21 nt, synthetic construct
  source 1..21: mol_type = other RNA
gggatctcagatgcctgatca

SEQ ID NO: 1163 - RNA, 21 nt, synthetic construct
  source 1..21: mol_type = other RNA
tgatcatgatcagaatgaaga

SEQ ID NO: 1164 - RNA, 21 nt, synthetic construct
  source 1..21: mol_type = other RNA
tgaaggatttcattgccggga

SEQ ID NO: 1165 - RNA, 21 nt, synthetic construct
  source 1..21: mol_type = other RNA
ttcattgccgggaagaatgca

SEQ ID NO: 1166 - RNA, 21 nt, synthetic construct
  source 1..21: mol_type = other RNA
tgagcatgtgaggaacatcaa

SEQ ID NO: 1167 - RNA, 21 nt, synthetic construct
  source 1..21: mol_type = other RNA
catcatcgcgctgtctattga

SEQ ID NO: 1168 - RNA, 21 nt, synthetic construct
  source 1..21: mol_type = other RNA
tattgaagctactgctgctga

SEQ ID NO: 1169 - RNA, 21 nt, synthetic construct
  source 1..21: mol_type = other RNA
gaagctactgctgctgatgta

SEQ ID NO: 1170 - RNA, 21 nt, synthetic construct
  source 1..21: mol_type = other RNA
atgtcgaggcttatgacgaca

SEQ ID NO: 1171 - RNA, 21 nt, synthetic construct
  source 1..21: mol_type = other RNA
caaacggactttcgcaaccta

SEQ ID NO: 1172 - RNA, 21 nt, synthetic construct
  source 1..21: mol_type = other RNA
aacctttgggaaagatgtcaa

SEQ ID NO: 1173 - RNA, 21 nt, synthetic construct
  source 1..21: mol_type = other RNA
tgggaaagatgtcagcgacca

SEQ ID NO: 1174 - RNA, 21 nt, synthetic construct
  source 1..21: mol_type = other RNA
aaaggcaagaggactgtcgaa

SEQ ID NO: 1175 - RNA, 21 nt, synthetic construct
  source 1..21: mol_type = other RNA
gaggactgtcgatgtgaccaa

SEQ ID NO: 1176 - RNA, 21 nt, synthetic construct
  source 1..21: mol_type = other RNA
gccttccgtgtcttacaccaa

SEQ ID NO: 1177 - RNA, 21 nt, synthetic construct
  source 1..21: mol_type = other RNA
ccttccgtgtcttacaccata

SEQ ID NO: 1178 - RNA, 21 nt, synthetic construct
  source 1..21: mol_type = other RNA
tgatctggagcagtatgtcaa

SEQ ID NO: 1179 - RNA, 21 nt, synthetic construct
  source 1..21: mol_type = other RNA
tgtcaacaatgtcaacaatga

SEQ ID NO: 1180 - RNA, 21 nt, synthetic construct
  source 1..21: mol_type = other RNA
gtcaacaatggccctactcga

SEQ ID NO: 1181 - RNA, 21 nt, synthetic construct
  source 1..21: mol_type = other RNA
gagctgatagcgagaaagtca

SEQ ID NO: 1182 - RNA, 21 nt, synthetic construct
  source 1..21: mol_type = other RNA
aaagtcatgcatgaggtcaga

SEQ ID NO: 1183 - RNA, 21 nt, synthetic construct
  source 1..21: mol_type = other RNA
ttctgaaggaaggtcgcaaca

SEQ ID NO: 1184 - RNA, 21 nt, synthetic construct
  source 1..21: mol_type = other RNA
ggaaggtcgcaacaaagagta

SEQ ID NO: 1185 - RNA, 21 nt, synthetic construct
  source 1..21: mol_type = other RNA
caaagagtcccctggtgtgaa

SEQ ID NO: 1186 - RNA, 21 nt, synthetic construct
  source 1..21: mol_type = other RNA
tgtgaagcgtctgaaggataa

SEQ ID NO: 1187 - RNA, 21 nt, synthetic construct
  source 1..21: mol_type = other RNA
ggatatcgttctctaaaccaa

SEQ ID NO: 1188 - RNA, 21 nt, synthetic construct
  source 1..21: mol_type = other RNA
aaccagtctccaggaagaaga

SEQ ID NO: 1189 - RNA, 21 nt, synthetic construct
  source 1..21: mol_type = other RNA
agaagagaaagaaaccacaca

SEQ ID NO: 1190 - RNA, 21 nt, synthetic construct
  source 1..21: mol_type = other RNA
ccacactggctagtgaagaaa

SEQ ID NO: 1191 - RNA, 21 nt, synthetic construct
  source 1..21: mol_type = other RNA
aagaagcaggagcttcttgta

SEQ ID NO: 1192 - RNA, 21 nt, synthetic construct
  source 1..21: mol_type = other RNA
cttgttttaattgctcaccaa

SEQ ID NO: 1193 - RNA, 21 nt, synthetic construct
  source 1..21: mol_type = other RNA
caccaatggttggttcttgaa

SEQ ID NO: 1194 - RNA, 21 nt, synthetic construct
  source 1..21: mol_type = other RNA
cttgagtggctatatttcaga

SEQ ID NO: 1195 - RNA, 21 nt, synthetic construct
  source 1..21: mol_type = other RNA
ttcagagcttttcctaaatga

SEQ ID NO: 1196 - RNA, 21 nt, synthetic construct
  source 1..21: mol_type = other RNA
aaatgtattgtttataggtga

SEQ ID NO: 1197 - RNA, 21 nt, synthetic construct
  source 1..21: mol_type = other RNA
aggtgattatcattctgtgaa

SEQ ID NO: 1198 - RNA, 21 nt, synthetic construct
  source 1..21: mol_type = other RNA
tgtgacagtcccttgtttcaa

SEQ ID NO: 1199 - RNA, 21 nt, synthetic construct
  source 1..21: mol_type = other RNA
agtcccttgtttcaacaggca

SEQ ID NO: 1200 - RNA, 21 nt, synthetic construct
  source 1..21: mol_type = other RNA
gggtgttcagttggagcaaaa

SEQ ID NO: 1201 - RNA, 21 nt, synthetic construct
  source 1..21: mol_type = other RNA
gcaaattagctttggcttgaa

SEQ ID NO: 1202 - RNA, 21 nt, synthetic construct
  source 1..21: mol_type = other RNA
tggcttgagttgttcatggga

SEQ ID NO: 1203 - RNA, 21 nt, synthetic construct
  source 1..21: mol_type = other RNA
gttcatggggccttgatgtta

SEQ ID NO: 1204 - RNA, 21 nt, synthetic construct
  source 1..21: mol_type = other RNA
atgttggggaaacagagacaa

SEQ ID NO: 1205 - RNA, 21 nt, synthetic construct
  source 1..21: mol_type = other RNA
agacaaattcagttgtgaaaa

SEQ ID NO: 1206 - RNA, 21 nt, synthetic construct
  source 1..21: mol_type = other RNA
tgaaaagtattatgtattaaa

SEQ ID NO: 1207 - RNA, 21 nt, synthetic construct
  source 1..21: mol_type = other RNA
attaagtgtttgaatttataa

SEQ ID NO: 1208 - RNA, 21 nt, synthetic construct
  source 1..21: mol_type = other RNA
ttatatatttttctatgtcaa

SEQ ID NO: 1209 - RNA, 21 nt, synthetic construct
  source 1..21: mol_type = other RNA
atgtcaaaattataatataaa

SEQ ID NO: 1210 - RNA, 21 nt, synthetic construct
  source 1..21: mol_type = other RNA
tataaattaccattgtttgta

SEQ ID NO: 1211 - RNA, 21 nt, synthetic construct
  source 1..21: mol_type = other RNA
tttgtggaggattacatttaa

SEQ ID NO: 1212 - RNA, 21 nt, synthetic construct
  source 1..21: mol_type = other RNA
atttaaaaaagcaaaaagtga

SEQ ID NO: 1213 - RNA, 21 nt, synthetic construct
  source 1..21: mol_type = other RNA
aagtgaaaaaaaaaagctcta

SEQ ID NO: 1214 - RNA, 21 nt, synthetic construct
  source 1..21: mol_type = other RNA
gctctggacacctttaataaa

SEQ ID NO: 1215 - RNA, 21 nt, synthetic construct
  source 1..21: mol_type = other RNA
aataagctcgccactgtttta

SEQ ID NO: 1216 - RNA, 21 nt, synthetic construct
  source 1..21: mol_type = other RNA
gttttttgtagtgtagacaaa

SEQ ID NO: 1217 - RNA, 21 nt, synthetic construct
  source 1..21: mol_type = other RNA
gacaagttaatggtcatttaa

SEQ ID NO: 1218 - RNA, 21 nt, synthetic construct
  source 1..21: mol_type = other RNA
atttattgtgtactattcata

SEQ ID NO: 1219 - RNA, 21 nt, synthetic construct
  source 1..21: mol_type = other RNA
ttcattgattcagtgatgtga

SEQ ID NO: 1220 - RNA, 21 nt, synthetic construct
  source 1..21: mol_type = other RNA
atgtgaaattgagcccccaaa

SEQ ID NO: 1221 - RNA, 21 nt, synthetic construct
  source 1..21: mol_type = other RNA
cccaaaaggttgtttctgaaa

SEQ ID NO: 1222 - RNA, 21 nt, synthetic construct
  source 1..21: mol_type = other RNA
ctgaagctcgagtacttccca

SEQ ID NO: 1223 - RNA, 21 nt, synthetic construct
  source 1..21: mol_type = other RNA
cttcccaatgccgctacttta

SEQ ID NO: 1224 - RNA, 21 nt, synthetic construct
  source 1..21: mol_type = other RNA
gtggacacccctgctttaaaa

SEQ ID NO: 1225 - RNA, 21 nt, synthetic construct
  source 1..21: mol_type = other RNA
ttaaaaacccttttgctagca

SEQ ID NO: 1226 - RNA, 21 nt, synthetic construct
  source 1..21: mol_type = other RNA
ctagctgtgctattgttgtaa

SEQ ID NO: 1227 - RNA, 21 nt, synthetic construct
  source 1..21: mol_type = other RNA
ttgtatttgatattgcaaata

SEQ ID NO: 1228 - RNA, 21 nt, synthetic construct
  source 1..21: mol_type = other RNA
caaattgctatgtgtgtggta

SEQ ID NO: 1229 - RNA, 21 nt, synthetic construct
  source 1..21: mol_type = other RNA
gtggtgatggcaaaaggctta

SEQ ID NO: 1230 - RNA, 21 nt, synthetic construct
  source 1..21: mol_type = other RNA
ggcttttaaaagttggtgtta

SEQ ID NO: 1231 - RNA, 21 nt, synthetic construct
  source 1..21: mol_type = other RNA
gtgttttctttttcttaaaaa

SEQ ID NO: 1232 - RNA, 21 nt, synthetic construct
  source 1..21: mol_type = other RNA
taaaaaaataataaaactaca

SEQ ID NO: 1233 - RNA, 21 nt, synthetic construct
  source 1..21: mol_type = other RNA
actacagacaaaaacaaagta

SEQ ID NO: 1234 - RNA, 21 nt, synthetic construct
  source 1..21: mol_type = other RNA
aaagtgcaaacaactgagaca

SEQ ID NO: 1235 - RNA, 21 nt, synthetic construct
  source 1..21: mol_type = other RNA
gagacagcaaatgaatgagca

SEQ ID NO: 1236 - RNA, 21 nt, synthetic construct
  source 1..21: mol_type = other RNA
tgagcaacaccatgcatataa

SEQ ID NO: 1237 - RNA, 21 nt, synthetic construct
  source 1..21: mol_type = other RNA
atatagattgagtacttggaa

SEQ ID NO: 1238 - RNA, 21 nt, synthetic construct
  source 1..21: mol_type = other RNA
ttggagaatactcacgtttta

SEQ ID NO: 1239 - RNA, 21 nt, synthetic construct
  source 1..21: mol_type = other RNA
gttttttaactcatgtagtga

SEQ ID NO: 1240 - RNA, 21 nt, synthetic construct
  source 1..21: mol_type = other RNA
tagtgattgctcaccacttta

SEQ ID NO: 1241 - RNA, 21 nt, synthetic construct
  source 1..21: mol_type = other RNA
actttgcaaagtatttttcca

SEQ ID NO: 1242 - RNA, 21 nt, synthetic construct
  source 1..21: mol_type = other RNA
tttcctgcctttcagtggtca

SEQ ID NO: 1243 - RNA, 21 nt, synthetic construct
  source 1..21: mol_type = other RNA
ttcctgcctttcagtggtcta

SEQ ID NO: 1244 - RNA, 21 nt, synthetic construct
  source 1..21: mol_type = other RNA
cccaggtccatgatagatcaa

SEQ ID NO: 1245 - RNA, 21 nt, synthetic construct
  source 1..21: mol_type = other RNA
gatcattgcagaaagtcatta

SEQ ID NO: 1246 - RNA, 21 nt, synthetic construct
  source 1..21: mol_type = other RNA
tcatttttggataggctgcta

SEQ ID NO: 1247 - RNA, 21 nt, synthetic construct
  source 1..21: mol_type = other RNA
ctgctatctaatttgcagtta

SEQ ID NO: 1248 - RNA, 21 nt, synthetic construct
  source 1..21: mol_type = other RNA
cagttgtcagaaatactgtga

SEQ ID NO: 1249 - RNA, 21 nt, synthetic construct
  source 1..21: mol_type = other RNA
ctgtgctgaaagttttatgaa

SEQ ID NO: 1250 - RNA, 21 nt, synthetic construct
  source 1..21: mol_type = other RNA
tatgacatccatcttttaaaa

SEQ ID NO: 1251 - RNA, 21 nt, synthetic construct
  source 1..21: mol_type = other RNA
ttaaattttcaggccctgaaa

SEQ ID NO: 1252 - RNA, 21 nt, synthetic construct
  source 1..21: mol_type = other RNA
caggccctgaacaggaaagta

SEQ ID NO: 1253 - RNA, 21 nt, synthetic construct
  source 1..21: mol_type = other RNA
aaagttgctcctgaagttata

SEQ ID NO: 1254 - RNA, 21 nt, synthetic construct
  source 1..21: mol_type = other RNA
gttatgtttccaggcttagaa

SEQ ID NO: 1255 - RNA, 21 nt, synthetic construct
  source 1..21: mol_type = other RNA
ttagaaattccctctctccaa

SEQ ID NO: 1256 - RNA, 21 nt, synthetic construct
  source 1..21: mol_type = other RNA
ctccaatcatctaaaattgaa

SEQ ID NO: 1257 - RNA, 21 nt, synthetic construct
  source 1..21: mol_type = other RNA
attgaagatgactgaatctaa

SEQ ID NO: 1258 - RNA, 21 nt, synthetic construct
  source 1..21: mol_type = other RNA
atctattttaagatctaaata

SEQ ID NO: 1259 - RNA, 21 nt, synthetic construct
  source 1..21: mol_type = other RNA
taaattagcatctcttcagaa

SEQ ID NO: 1260 - RNA, 21 nt, synthetic construct
  source 1..21: mol_type = other RNA
tcagacacacacttcctgata

SEQ ID NO: 1261 - RNA, 21 nt, synthetic construct
  source 1..21: mol_type = other RNA
ctgattcagtgtttcccaata

SEQ ID NO: 1262 - RNA, 21 nt, synthetic construct
  source 1..21: mol_type = other RNA
ccaatcatgattagaattaga

SEQ ID NO: 1263 - RNA, 21 nt, synthetic construct
  source 1..21: mol_type = other RNA
attagactgcaaagcacgtca

SEQ ID NO: 1264 - RNA, 21 nt, synthetic construct
  source 1..21: mol_type = other RNA
agactgcaaagcacgtcatga

SEQ ID NO: 1265 - RNA, 21 nt, synthetic construct
  source 1..21: mol_type = other RNA
tgggattgagaactccatgta

SEQ ID NO: 1266 - RNA, 21 nt, synthetic construct
  source 1..21: mol_type = other RNA
catgttgctctgtatcttaga

SEQ ID NO: 1267 - RNA, 21 nt, synthetic construct
  source 1..21: mol_type = other RNA
cttaggcttatatacgtagga

SEQ ID NO: 1268 - RNA, 21 nt, synthetic construct
  source 1..21: mol_type = other RNA
gtagggatagagtaagcagta

SEQ ID NO: 1269 - RNA, 21 nt, synthetic construct
  source 1..21: mol_type = other RNA
gcagtacaaagtgtatattta

SEQ ID NO: 1270 - RNA, 21 nt, synthetic construct
  source 1..21: mol_type = other RNA
tattttggaaaagacaggtaa

SEQ ID NO: 1271 - RNA, 21 nt, synthetic construct
  source 1..21: mol_type = other RNA
aggtaacaggtaacagcatca

SEQ ID NO: 1272 - RNA, 21 nt, synthetic construct
  source 1..21: mol_type = other RNA
gcatcgctaatccaattacta

SEQ ID NO: 1273 - RNA, 21 nt, synthetic construct
  source 1..21: mol_type = other RNA
ttactgtgccttctaaacgga

SEQ ID NO: 1274 - RNA, 21 nt, synthetic construct
  source 1..21: mol_type = other RNA
aacggagacactcagacacta

SEQ ID NO: 1275 - RNA, 21 nt, synthetic construct
  source 1..21: mol_type = other RNA
acacttgaactcatcttttta

SEQ ID NO: 1276 - RNA, 21 nt, synthetic construct
  source 1..21: mol_type = other RNA
tttttatgactaatagtttta

SEQ ID NO: 1277 - RNA, 21 nt, synthetic construct
  source 1..21: mol_type = other RNA
gttttttgattaaaaatgtga

SEQ ID NO: 1278 - RNA, 21 nt, synthetic construct
  source 1..21: mol_type = other RNA
atgtgaacaagaaaatactaa

SEQ ID NO: 1279 - RNA, 21 nt, synthetic construct
  source 1..21: mol_type = other RNA
tactaaaataaaaatccttta

SEQ ID NO: 1280 - RNA, 21 nt, synthetic construct
  source 1..21: mol_type = other RNA
cctttcgatttagccaactca

SEQ ID NO: 1281 - RNA, 21 nt, synthetic construct
  source 1..21: mol_type = other RNA
aactctttttgctgtaggcta

SEQ ID NO: 1282 - RNA, 21 nt, synthetic construct
  source 1..21: mol_type = other RNA
aggctaggaatacacccttta

SEQ ID NO: 1283 - RNA, 21 nt, synthetic construct
  source 1..21: mol_type = other RNA
cctttttaaattaacacacta

SEQ ID NO: 1284 - RNA, 21 nt, synthetic construct
  source 1..21: mol_type = other RNA
acactgtagatccttttttta

SEQ ID NO: 1285 - RNA, 21 nt, synthetic construct
  source 1..21: mol_type = other RNA
tttttctgttttaacattcca

SEQ ID NO: 1286 - RNA, 21 nt, synthetic construct
  source 1..21: mol_type = other RNA
attcctctaactcccccatta

SEQ ID NO: 1287 - RNA, 21 nt, synthetic construct
  source 1..21: mol_type = other RNA
ccatttatcttttgtctatta

SEQ ID NO: 1288 - RNA, 21 nt, synthetic construct
  source 1..21: mol_type = other RNA
ctattaatattcactagccaa

SEQ ID NO: 1289 - RNA, 21 nt, synthetic construct
  source 1..21: mol_type = other RNA
agccaacatagtatttttgca

SEQ ID NO: 1290 - RNA, 21 nt, synthetic construct
  source 1..21: mol_type = other RNA
tttgcagcctaagagttcata

SEQ ID NO: 1291 - RNA, 21 nt, synthetic construct
  source 1..21: mol_type = other RNA
ttcattatttaaaaataaaca

SEQ ID NO: 1292 - RNA, 21 nt, synthetic construct
  source 1..21: mol_type = other RNA
taaactaaagaaatatgtcaa

SEQ ID NO: 1293 - RNA, 21 nt, synthetic construct
  source 1..21: mol_type = other RNA
tgtcacctttgttctgcctta

SEQ ID NO: 1294 - RNA, 21 nt, synthetic construct
  source 1..21: mol_type = other RNA
gccttggtcttaagagagtta

SEQ ID NO: 1295 - RNA, 21 nt, synthetic construct
  source 1..21: mol_type = other RNA
gagttgtttctagagaaacaa

SEQ ID NO: 1296 - RNA, 21 nt, synthetic construct
  source 1..21: mol_type = other RNA
aaacaagttttatggttctga

SEQ ID NO: 1297 - RNA, 21 nt, synthetic construct
  source 1..21: mol_type = other RNA
ttctgttttcatttgtttcaa

SEQ ID NO: 1298 - RNA, 21 nt, synthetic construct
  source 1..21: mol_type = other RNA
tttcattttttgaaattcaga

SEQ ID NO: 1299 - RNA, 21 nt, synthetic construct
  source 1..21: mol_type = other RNA
ttcaggaatacacagagagaa

SEQ ID NO: 1300 - RNA, 21 nt, synthetic construct
  source 1..21: mol_type = other RNA
agagaaggcctagaggttaga

SEQ ID NO: 1301 - RNA, 21 nt, synthetic construct
  source 1..21: mol_type = other RNA
gttagagcactagaatgcaaa

SEQ ID NO: 1302 - RNA, 21 nt, synthetic construct
  source 1..21: mol_type = other RNA
tgcaaaagaggatttatttta

SEQ ID NO: 1303 - RNA, 21 nt, synthetic construct
  source 1..21: mol_type = other RNA
attttcttaagtttaggtaga

SEQ ID NO: 1304 - RNA, 21 nt, synthetic construct
  source 1..21: mol_type = other RNA
ggtagataagtcagctcttta

SEQ ID NO: 1305 - RNA, 21 nt, synthetic construct
  source 1..21: mol_type = other RNA
tcttttgaatgttttacttaa

SEQ ID NO: 1306 - RNA, 21 nt, synthetic construct
  source 1..21: mol_type = other RNA
acttatttttgcctgagttca

SEQ ID NO: 1307 - RNA, 21 nt, synthetic construct
  source 1..21: mol_type = other RNA
agttcctagctttacgcatta

SEQ ID NO: 1308 - RNA, 21 nt, synthetic construct
  source 1..21: mol_type = other RNA
gcattactaggaatattttca

SEQ ID NO: 1309 - RNA, 21 nt, synthetic construct
  source 1..21: mol_type = other RNA
ttttcttttacaggagggaga

SEQ ID NO: 1310 - RNA, 21 nt, synthetic construct
  source 1..21: mol_type = other RNA
caggagggagaagggttttga

SEQ ID NO: 1311 - RNA, 21 nt, synthetic construct
  source 1..21: mol_type = other RNA
gttaggtaggggagaacatta

SEQ ID NO: 1312 - RNA, 21 nt, synthetic construct
  source 1..21: mol_type = other RNA
acatttctgaaaaagaactta

SEQ ID NO: 1313 - RNA, 21 nt, synthetic construct
  source 1..21: mol_type = other RNA
aacttataatgaagctacaaa

SEQ ID NO: 1314 - RNA, 21 nt, synthetic construct
  source 1..21: mol_type = other RNA
tacaaatccatccttatttca

SEQ ID NO: 1315 - RNA, 21 nt, synthetic construct
  source 1..21: mol_type = other RNA
atttcttattcagtgctgaaa

SEQ ID NO: 1316 - RNA, 21 nt, synthetic construct
  source 1..21: mol_type = other RNA
ctgaatactacctcatgcaaa

SEQ ID NO: 1317 - RNA, 21 nt, synthetic construct
  source 1..21: mol_type = other RNA
tgcaaaatattggtgtggcta

SEQ ID NO: 1318 - RNA, 21 nt, synthetic construct
  source 1..21: mol_type = other RNA
tggctgcaaatttccctctga

SEQ ID NO: 1319 - RNA, 21 nt, synthetic construct
  source 1..21: mol_type = other RNA
ctctgaagctgacacaattaa

SEQ ID NO: 1320 - RNA, 21 nt, synthetic construct
  source 1..21: mol_type = other RNA
aattaaggatgaattaccata

SEQ ID NO: 1321 - RNA, 21 nt, synthetic construct
  source 1..21: mol_type = other RNA
accataacatcttcattttta

SEQ ID NO: 1322 - RNA, 21 nt, synthetic construct
  source 1..21: mol_type = other RNA
tttttcctcatttcattgcca

SEQ ID NO: 1323 - RNA, 21 nt, synthetic construct
  source 1..21: mol_type = other RNA
ttgcctctcatacagttttca

SEQ ID NO: 1324 - RNA, 21 nt, synthetic construct
  source 1..21: mol_type = other RNA
ttttctccctctgatttatta

SEQ ID NO: 1325 - RNA, 21 nt, synthetic construct
  source 1..21: mol_type = other RNA
ttatttcattttggtagtgga

SEQ ID NO: 1326 - RNA, 21 nt, synthetic construct
  source 1..21: mol_type = other RNA
agtggattttgaattaagtaa

SEQ ID NO: 1327 - RNA, 21 nt, synthetic construct
  source 1..21: mol_type = other RNA
aagtatttatttctctttgca

SEQ ID NO: 1328 - RNA, 21 nt, synthetic construct
  source 1..21: mol_type = other RNA
tttgcaagtgactatttgata

SEQ ID NO: 1329 - RNA, 21 nt, synthetic construct
  source 1..21: mol_type = other RNA
ttgattaacacattaaaaata

SEQ ID NO: 1330 - RNA, 21 nt, synthetic construct
  source 1..21: mol_type = other RNA
aaaattttttaaaaatttcca

SEQ ID NO: 1331 - RNA, 21 nt, synthetic construct
  source 1..21: mol_type = other RNA
tttcccctttaagttatgata

SEQ ID NO: 1332 - RNA, 21 nt, synthetic construct
  source 1..21: mol_type = other RNA
atgatggctgcctatagaata

SEQ ID NO: 1333 - RNA, 21 nt, synthetic construct
  source 1..21: mol_type = other RNA
agaatttagactgtttctcaa

SEQ ID NO: 1334 - RNA, 21 nt, synthetic construct
  source 1..21: mol_type = other RNA
tctcaccctgatccatcctga

SEQ ID NO: 1335 - RNA, 21 nt, synthetic construct
  source 1..21: mol_type = other RNA
tcctgatattatgttattaga

SEQ ID NO: 1336 - RNA, 21 nt, synthetic construct
  source 1..21: mol_type = other RNA
attagctacgatttcaaggta

SEQ ID NO: 1337 - RNA, 21 nt, synthetic construct
  source 1..21: mol_type = other RNA
aaggtcactttgaagtcagaa

SEQ ID NO: 1338 - RNA, 21 nt, synthetic construct
  source 1..21: mol_type = other RNA
tcagacttcacagttttctaa

SEQ ID NO: 1339 - RNA, 21 nt, synthetic construct
  source 1..21: mol_type = other RNA
ttctacaggtgtatttcttga

SEQ ID NO: 1340 - RNA, 21 nt, synthetic construct
  source 1..21: mol_type = other RNA
tcttgctatgctcagtgggaa

SEQ ID NO: 1341 - RNA, 21 nt, synthetic construct
  source 1..21: mol_type = other RNA
cttgctatgctcagtgggaaa

SEQ ID NO: 1342 - RNA, 21 nt, synthetic construct
  source 1..21: mol_type = other RNA
aaccagggagcagaaaagata

SEQ ID NO: 1343 - RNA, 21 nt, synthetic construct
  source 1..21: mol_type = other RNA
aagattgtggaaagtgggaaa

SEQ ID NO: 1344 - RNA, 21 nt, synthetic construct
  source 1..21: mol_type = other RNA
gggaacattaattgtcacgta

SEQ ID NO: 1345 - RNA, 21 nt, synthetic construct
  source 1..21: mol_type = other RNA
attgtcacgtggctgttgaga

SEQ ID NO: 1346 - RNA, 21 nt, synthetic construct
  source 1..21: mol_type = other RNA
tgcctcttaccagccaagtta

SEQ ID NO: 1347 - RNA, 21 nt, synthetic construct
  source 1..21: mol_type = other RNA
aagttttaaatggttagagta

SEQ ID NO: 1348 - RNA, 21 nt, synthetic construct
  source 1..21: mol_type = other RNA
agagtggcattggcattgata

SEQ ID NO: 1349 - RNA, 21 nt, synthetic construct
  source 1..21: mol_type = other RNA
ttgattttgcttttctcttga

SEQ ID NO: 1350 - RNA, 21 nt, synthetic construct
  source 1..21: mol_type = other RNA
tcttgggttttcttcatttca

SEQ ID NO: 1351 - RNA, 21 nt, synthetic construct
  source 1..21: mol_type = other RNA
atttcttttcataattcatca

SEQ ID NO: 1352 - RNA, 21 nt, synthetic construct
  source 1..21: mol_type = other RNA
tcatcttcaagctatagatca

SEQ ID NO: 1353 - RNA, 21 nt, synthetic construct
  source 1..21: mol_type = other RNA
agatccatccttcttccctaa

SEQ ID NO: 1354 - RNA, 21 nt, synthetic construct
  source 1..21: mol_type = other RNA
ccctatccaaatactttgtta

SEQ ID NO: 1355 - RNA, 21 nt, synthetic construct
  source 1..21: mol_type = other RNA
tttgttctcagtgggcagtca

SEQ ID NO: 1356 - RNA, 21 nt, synthetic construct
  source 1..21: mol_type = other RNA
cagtcagatttttttggctta

SEQ ID NO: 1357 - RNA, 21 nt, synthetic construct
  source 1..21: mol_type = other RNA
tggcttccaaacctcactgaa

SEQ ID NO: 1358 - RNA, 21 nt, synthetic construct
  source 1..21: mol_type = other RNA
actgagcatgttcagagaata

SEQ ID NO: 1359 - RNA, 21 nt, synthetic construct
  source 1..21: mol_type = other RNA
agaattcctctcattaaggaa

SEQ ID NO: 1360 - RNA, 21 nt, synthetic construct
  source 1..21: mol_type = other RNA
aaggaaatatttttccccaca

SEQ ID NO: 1361 - RNA, 21 nt, synthetic construct
  source 1..21: mol_type = other RNA
cccacaattgtctgatgtata

SEQ ID NO: 1362 - RNA, 21 nt, synthetic construct
  source 1..21: mol_type = other RNA
tgtatgagtcctctcagaaga

SEQ ID NO: 1363 - RNA, 21 nt, synthetic construct
  source 1..21: mol_type = other RNA
agaagcacaagtgcatactaa

SEQ ID NO: 1364 - RNA, 21 nt, synthetic construct
  source 1..21: mol_type = other RNA
tactaggaaggctttgtaaaa

SEQ ID NO: 1365 - RNA, 21 nt, synthetic construct
  source 1..21: mol_type = other RNA
gtaaactggttttgtaggcaa

SEQ ID NO: 1366 - RNA, 21 nt, synthetic construct
  source 1..21: mol_type = other RNA
tggttttgtaggcaggctgta

SEQ ID NO: 1367 - RNA, 21 nt, synthetic construct
  source 1..21: mol_type = other RNA
gctgtacctgcaaataggcaa

SEQ ID NO: 1368 - RNA, 21 nt, synthetic construct
  source 1..21: mol_type = other RNA
aggcattctgagcaaggatca

SEQ ID NO: 1369 - RNA, 21 nt, synthetic construct
  source 1..21: mol_type = other RNA
ggatcctaaatttccctttga

SEQ ID NO: 1370 - RNA, 21 nt, synthetic construct
  source 1..21: mol_type = other RNA
tttccctttggctcatgtcca

SEQ ID NO: 1371 - RNA, 21 nt, synthetic construct
  source 1..21: mol_type = other RNA
accttctcctttttggcatga

SEQ ID NO: 1372 - RNA, 21 nt, synthetic construct
  source 1..21: mol_type = other RNA
gcatgtctggtgaaaagctaa

SEQ ID NO: 1373 - RNA, 21 nt, synthetic construct
  source 1..21: mol_type = other RNA
aagctacaaggttcacaggga

SEQ ID NO: 1374 - RNA, 21 nt, synthetic construct
  source 1..21: mol_type = other RNA
cagggccaaatattctcccta

SEQ ID NO: 1375 - RNA, 21 nt, synthetic construct
  source 1..21: mol_type = other RNA
tcccttttgttctctaaacaa

SEQ ID NO: 1376 - RNA, 21 nt, synthetic construct
  source 1..21: mol_type = other RNA
aaacatgttgcacacataaaa

SEQ ID NO: 1377 - RNA, 21 nt, synthetic construct
  source 1..21: mol_type = other RNA
ataaactcaagggagtgatta

SEQ ID NO: 1378 - RNA, 21 nt, synthetic construct
  source 1..21: mol_type = other RNA
tgatttcggttcctaagtcca

SEQ ID NO: 1379 - RNA, 21 nt, synthetic construct
  source 1..21: mol_type = other RNA
agtcctagggagttctattca

SEQ ID NO: 1380 - RNA, 21 nt, synthetic construct
  source 1..21: mol_type = other RNA
tattccatttattctgatgta

SEQ ID NO: 1381 - RNA, 21 nt, synthetic construct
  source 1..21: mol_type = other RNA
gatgtcccttttaaggaggaa

SEQ ID NO: 1382 - RNA, 21 nt, synthetic construct
  source 1..21: mol_type = other RNA
gaggagttggtgttgaagtga

SEQ ID NO: 1383 - RNA, 21 nt, synthetic construct
  source 1..21: mol_type = other RNA
aagtgtgacatgctttaatga

SEQ ID NO: 1384 - RNA, 21 nt, synthetic construct
  source 1..21: mol_type = other RNA
taatgataactgctttggcaa

SEQ ID NO: 1385 - RNA, 21 nt, synthetic construct
  source 1..21: mol_type = other RNA
tggcaattccccagacaggta

SEQ ID NO: 1386 - RNA, 21 nt, synthetic construct
  source 1..21: mol_type = other RNA
caggtatacttcttcatccaa

SEQ ID NO: 1387 - RNA, 21 nt, synthetic construct
  source 1..21: mol_type = other RNA
atccaaaattgcacctaagga

SEQ ID NO: 1388 - RNA, 21 nt, synthetic construct
  source 1..21: mol_type = other RNA
taaggtgttcatttagacaaa

SEQ ID NO: 1389 - RNA, 21 nt, synthetic construct
  source 1..21: mol_type = other RNA
gacaaaattgttcgcttagta

SEQ ID NO: 1390 - RNA, 21 nt, synthetic construct
  source 1..21: mol_type = other RNA
ttagtgatccactgatctcta

SEQ ID NO: 1391 - RNA, 21 nt, synthetic construct
  source 1..21: mol_type = other RNA
tctctaatcagaaatatttta

SEQ ID NO: 1392 - RNA, 21 nt, synthetic construct
  source 1..21: mol_type = other RNA
gaaatatttttaaaaaataca

SEQ ID NO: 1393 - RNA, 21 nt, synthetic construct
  source 1..21: mol_type = other RNA
aatacaatttagatctctgaa

SEQ ID NO: 1394 - RNA, 21 nt, synthetic construct
  source 1..21: mol_type = other RNA
tctgaaaattggaaccactca

SEQ ID NO: 1395 - RNA, 21 nt, synthetic construct
  source 1..21: mol_type = other RNA
cactcaagagtatcatcttga

SEQ ID NO: 1396 - RNA, 21 nt, synthetic construct
  source 1..21: mol_type = other RNA
tcttgatagtgttacttcaga

SEQ ID NO: 1397 - RNA, 21 nt, synthetic construct
  source 1..21: mol_type = other RNA
ttcagcatatgactgactgaa

SEQ ID NO: 1398 - RNA, 21 nt, synthetic construct
  source 1..21: mol_type = other RNA
actgattttatgaagggagta

SEQ ID NO: 1399 - RNA, 21 nt, synthetic construct
  source 1..21: mol_type = other RNA
ggagtttagctgacttttcca

SEQ ID NO: 1400 - RNA, 21 nt, synthetic construct
  source 1..21: mol_type = other RNA
tttccctgtagccctatcata

SEQ ID NO: 1401 - RNA, 21 nt, synthetic construct
  source 1..21: mol_type = other RNA
atcatattaaaaacaaaaaga

SEQ ID NO: 1402 - RNA, 21 nt, synthetic construct
  source 1..21: mol_type = other RNA
aaaagtggtccacttgaagca

SEQ ID NO: 1403 - RNA, 21 nt, synthetic construct
  source 1..21: mol_type = other RNA
ttgaagcagcaaggacaaaga

SEQ ID NO: 1404 - RNA, 21 nt, synthetic construct
  source 1..21: mol_type = other RNA
ggacaaagggcagtttaggga

SEQ ID NO: 1405 - RNA, 21 nt, synthetic construct
  source 1..21: mol_type = other RNA
ttgggcatccagagtggaaaa

SEQ ID NO: 1406 - RNA, 21 nt, synthetic construct
  source 1..21: mol_type = other RNA
ggaaaaggattattattgtaa

SEQ ID NO: 1407 - RNA, 21 nt, synthetic construct
  source 1..21: mol_type = other RNA
ttgtacataatagcagttcta

SEQ ID NO: 1408 - RNA, 21 nt, synthetic construct
  source 1..21: mol_type = other RNA
gttctggctggaattccaata

SEQ ID NO: 1409 - RNA, 21 nt, synthetic construct
  source 1..21: mol_type = other RNA
ccaatccactttctggggata

SEQ ID NO: 1410 - RNA, 21 nt, synthetic construct
  source 1..21: mol_type = other RNA
gggatcattttgatgttgaaa

SEQ ID NO: 1411 - RNA, 21 nt, synthetic construct
  source 1..21: mol_type = other RNA
ttgaatgttcccccaaagcaa

SEQ ID NO: 1412 - RNA, 21 nt, synthetic construct
  source 1..21: mol_type = other RNA
aagcattctgacaagtttgga

SEQ ID NO: 1413 - RNA, 21 nt, synthetic construct
  source 1..21: mol_type = other RNA
tttggtccacttggctcttta

SEQ ID NO: 1414 - RNA, 21 nt, synthetic construct
  source 1..21: mol_type = other RNA
tctttaccccgggtaataaga

SEQ ID NO: 1415 - RNA, 21 nt, synthetic construct
  source 1..21: mol_type = other RNA
ataagacccttattgacttta

SEQ ID NO: 1416 - RNA, 21 nt, synthetic construct
  source 1..21: mol_type = other RNA
actttgaaaaactggcataaa

SEQ ID NO: 1417 - RNA, 21 nt, synthetic construct
  source 1..21: mol_type = other RNA
cataaatgagcttaagaaata

SEQ ID NO: 1418 - RNA, 21 nt, synthetic construct
  source 1..21: mol_type = other RNA
gaaatccattgtatacagtca

SEQ ID NO: 1419 - RNA, 21 nt, synthetic construct
  source 1..21: mol_type = other RNA
cagtcctagtgtttgccttca

SEQ ID NO: 1420 - RNA, 21 nt, synthetic construct
  source 1..21: mol_type = other RNA
ccttcttggtaaaattacata

SEQ ID NO: 1421 - RNA, 21 nt, synthetic construct
  source 1..21: mol_type = other RNA
tacatttaaggatgtcattta

SEQ ID NO: 1422 - RNA, 21 nt, synthetic construct
  source 1..21: mol_type = other RNA
catttcatgagtcaaattgta

SEQ ID NO: 1423 - RNA, 21 nt, synthetic construct
  source 1..21: mol_type = other RNA
attgtatctgctgacactgaa

SEQ ID NO: 1424 - RNA, 21 nt, synthetic construct
  source 1..21: mol_type = other RNA
actgaagtgtattgagatgta

SEQ ID NO: 1425 - RNA, 21 nt, synthetic construct
  source 1..21: mol_type = other RNA
gatgttgttctttagtttaaa

SEQ ID NO: 1426 - RNA, 21 nt, synthetic construct
  source 1..21: mol_type = other RNA
tttaagtatgtaacaaagtaa

SEQ ID NO: 1427 - RNA, 21 nt, synthetic construct
  source 1..21: mol_type = other RNA
aagtaatattcaaaggggata

SEQ ID NO: 1428 - RNA, 21 nt, synthetic construct
  source 1..21: mol_type = other RNA
tcaaaggggatgtttggggga

SEQ ID NO: 1429 - RNA, 21 nt, synthetic construct
  source 1..21: mol_type = other RNA
accgggtggctttatattgaa

SEQ ID NO: 1430 - RNA, 21 nt, synthetic construct
  source 1..21: mol_type = other RNA
attgataatgaaatattccaa

SEQ ID NO: 1431 - RNA, 21 nt, synthetic construct
  source 1..21: mol_type = other RNA
ttccagagcaaaacacattga

SEQ ID NO: 1432 - RNA, 21 nt, synthetic construct
  source 1..21: mol_type = other RNA
cattgtcctaatgaagttgta

SEQ ID NO: 1433 - RNA, 21 nt, synthetic construct
  source 1..21: mol_type = other RNA
gttgttgcagctctcttcgta

SEQ ID NO: 1434 - RNA, 21 nt, synthetic construct
  source 1..21: mol_type = other RNA
tcttcgttttcttgtgccgca

SEQ ID NO: 1435 - RNA, 21 nt, synthetic construct
  source 1..21: mol_type = other RNA
ttcttgtgccgctggaattga

SEQ ID NO: 1436 - RNA, 21 nt, synthetic construct
  source 1..21: mol_type = other RNA
gaattggcttgtgggtcacta

SEQ ID NO: 1437 - RNA, 21 nt, synthetic construct
  source 1..21: mol_type = other RNA
tcacttgttgtgcaaaagtga

SEQ ID NO: 1438 - RNA, 21 nt, synthetic construct
  source 1..21: mol_type = other RNA
aagtgaattaatttcaaataa

SEQ ID NO: 1439 - RNA, 21 nt, synthetic construct
  source 1..21: mol_type = other RNA
aaataggaatcatattgctta

SEQ ID NO: 1440 - RNA, 21 nt, synthetic construct
  source 1..21: mol_type = other RNA
tgcttttgtgaaacaaagaaa

SEQ ID NO: 1441 - RNA, 21 nt, synthetic construct
  source 1..21: mol_type = other RNA
aagaaaatttaccaccttgta

SEQ ID NO: 1442 - RNA, 21 nt, synthetic construct
  source 1..21: mol_type = other RNA
cttgtctgatacatagattga

SEQ ID NO: 1443 - RNA, 21 nt, synthetic construct
  source 1..21: mol_type = other RNA
gattggaaggcgctcttggta

SEQ ID NO: 1444 - RNA, 21 nt, synthetic construct
  source 1..21: mol_type = other RNA
ttggtaaagaataacccacaa

SEQ ID NO: 1445 - RNA, 21 nt, synthetic construct
  source 1..21: mol_type = other RNA
ccacaaacacctgatcttgaa

SEQ ID NO: 1446 - RNA, 21 nt, synthetic construct
  source 1..21: mol_type = other RNA
cttgattggaaagcattgtaa

SEQ ID NO: 1447 - RNA, 21 nt, synthetic construct
  source 1..21: mol_type = other RNA
ttgtaggtcattagggaaaaa

SEQ ID NO: 1448 - RNA, 21 nt, synthetic construct
  source 1..21: mol_type = other RNA
gaaaactgatgatgctgacta

SEQ ID NO: 1449 - RNA, 21 nt, synthetic construct
  source 1..21: mol_type = other RNA
atgatgctgactgttgctcca

SEQ ID NO: 1450 - RNA, 21 nt, synthetic construct
  source 1..21: mol_type = other RNA
gctccagctgtgttggcaata

SEQ ID NO: 1451 - RNA, 21 nt, synthetic construct
  source 1..21: mol_type = other RNA
gcaattcaagatgaccttgta

SEQ ID NO: 1452 - RNA, 21 nt, synthetic construct
  source 1..21: mol_type = other RNA
cttgttactaactgaaagtta

SEQ ID NO: 1453 - RNA, 21 nt, synthetic construct
  source 1..21: mol_type = other RNA
aagttgctgtcaaccttagca

SEQ ID NO: 1454 - RNA, 21 nt, synthetic construct
  source 1..21: mol_type = other RNA
ttagcaaacaaaccagctaaa

SEQ ID NO: 1455 - RNA, 21 nt, synthetic construct
  source 1..21: mol_type = other RNA
gctaacaccattacagcacta

SEQ ID NO: 1456 - RNA, 21 nt, synthetic construct
  source 1..21: mol_type = other RNA
gcactggttaagtagatttta

SEQ ID NO: 1457 - RNA, 21 nt, synthetic construct
  source 1..21: mol_type = other RNA
atttttactggcactggctga

SEQ ID NO: 1458 - RNA, 21 nt, synthetic construct
  source 1..21: mol_type = other RNA
cagctgaggaaggctaggata

SEQ ID NO: 1459 - RNA, 21 nt, synthetic construct
  source 1..21: mol_type = other RNA
aggatacagactttaatgaca

SEQ ID NO: 1460 - RNA, 21 nt, synthetic construct
  source 1..21: mol_type = other RNA
atgaccaagagccagactaga

SEQ ID NO: 1461 - RNA, 21 nt, synthetic construct
  source 1..21: mol_type = other RNA
actagctcgagctagaaatca

SEQ ID NO: 1462 - RNA, 21 nt, synthetic construct
  source 1..21: mol_type = other RNA
aaatcagcaacaaatacctca

SEQ ID NO: 1463 - RNA, 21 nt, synthetic construct
  source 1..21: mol_type = other RNA
acctccttgtgctatttgaaa

SEQ ID NO: 1464 - RNA, 21 nt, synthetic construct
  source 1..21: mol_type = other RNA
ttgaatgctaaggtattagta

SEQ ID NO: 1465 - RNA, 21 nt, synthetic construct
  source 1..21: mol_type = other RNA
ttagttgcaataggcttacga

SEQ ID NO: 1466 - RNA, 21 nt, synthetic construct
  source 1..21: mol_type = other RNA
ttgcaataggcttacgcctta

SEQ ID NO: 1467 - RNA, 21 nt, synthetic construct
  source 1..21: mol_type = other RNA
gaatgagcctgatgacactaa

SEQ ID NO: 1468 - RNA, 21 nt, synthetic construct
  source 1..21: mol_type = other RNA
cactattactgtttacctgta

SEQ ID NO: 1469 - RNA, 21 nt, synthetic construct
  source 1..21: mol_type = other RNA
cctgtcaaaccagggtggaaa

SEQ ID NO: 1470 - RNA, 21 nt, synthetic construct
  source 1..21: mol_type = other RNA
tggaaatttagagggatgcaa

SEQ ID NO: 1471 - RNA, 21 nt, synthetic construct
  source 1..21: mol_type = other RNA
atgcaagtacagtatgtctca

SEQ ID NO: 1472 - RNA, 21 nt, synthetic construct
  source 1..21: mol_type = other RNA
gtctcattaagcagtctctga

SEQ ID NO: 1473 - RNA, 21 nt, synthetic construct
  source 1..21: mol_type = other RNA
ctctgttgctgattatatgaa

SEQ ID NO: 1474 - RNA, 21 nt, synthetic construct
  source 1..21: mol_type = other RNA
tatgaagataaaattgttgta

SEQ ID NO: 1475 - RNA, 21 nt, synthetic construct
  source 1..21: mol_type = other RNA
gttgtatatgctgatctgtaa

SEQ ID NO: 1476 - RNA, 21 nt, synthetic construct
  source 1..21: mol_type = other RNA
ctgtatgttatgtacatttta

SEQ ID NO: 1477 - RNA, 21 nt, synthetic construct
  source 1..21: mol_type = other RNA
attttcacagtgattgaatca

SEQ ID NO: 1478 - RNA, 21 nt, synthetic construct
  source 1..21: mol_type = other RNA
gaatcattgtaaaaagaaaaa

SEQ ID NO: 1479 - RNA, 21 nt, synthetic construct
  source 1..21: mol_type = other RNA
gaaaaaagacaaaaaagaata

SEQ ID NO: 1480 - RNA, 21 nt, synthetic construct
  source 1..21: mol_type = other RNA
agaatcaccactgtctattta

SEQ ID NO: 1481 - RNA, 21 nt, synthetic construct
  source 1..21: mol_type = other RNA
tattttatgaagatgataaaa

SEQ ID NO: 1482 - RNA, 21 nt, synthetic construct
  source 1..21: mol_type = other RNA
ataaagcagctttattaaata

SEQ ID NO: 1483 - RNA, 21 nt, synthetic construct
  source 1..21: mol_type = other RNA
taaattattacagttatgtta

SEQ ID NO: 1484 - RNA, 21 nt, synthetic construct
  source 1..21: mol_type = other RNA
atgtttcaaatggtgttatca

SEQ ID NO: 1485 - RNA, 21 nt, synthetic construct
  source 1..21: mol_type = other RNA
ttatctgccacattgtttcca

SEQ ID NO: 1486 - RNA, 21 nt, synthetic construct
  source 1..21: mol_type = other RNA
tttccttttatctggtggtta

SEQ ID NO: 1487 - RNA, 21 nt, synthetic construct
  source 1..21: mol_type = other RNA
tctggtggttctctgtttcca

SEQ ID NO: 1488 - RNA, 21 nt, synthetic construct
  source 1..21: mol_type = other RNA
tttccccctttaaatgtgtta

SEQ ID NO: 1489 - RNA, 21 nt, synthetic construct
  source 1..21: mol_type = other RNA
gtgttttctctgcttcaaaaa

SEQ ID NO: 1490 - RNA, 21 nt, synthetic construct
  source 1..21: mol_type = other RNA
caaaaatttaatgcattttaa

SEQ ID NO: 1491 - RNA, 21 nt, synthetic construct
  source 1..21: mol_type = other RNA
ttttagtattaaaggctatta

SEQ ID NO: 1492 - RNA, 21 nt, synthetic construct
  source 1..21: mol_type = other RNA
tcctgcctttcagtggtctga

SEQ ID NO: 1493 - RNA, 21 nt, synthetic construct
  source 1..21: mol_type = other RNA
taaggcagtagggatggggta

SEQ ID NO: 1494 - RNA, 21 nt, synthetic construct
  source 1..21: mol_type = other RNA
accccaccttctcctttttga

SEQ ID NO: 1495 - RNA, 21 nt, synthetic construct
  source 1..21: mol_type = other RNA
atgtttgggggtggggctgga

SEQ ID NO: 1496 - RNA, 21 nt, synthetic construct
  source 1..21: mol_type = other RNA
ctctagtgaggggaatgagca

1.-6. (canceled)

7. An oligomeric compound comprising a modified oligonucleotide consisting of 12 to 50 linked nucleosides and having a nucleobase sequence comprising at least 12, at least 13, at least 14, at least 15, at least 16, at least 17, at least 18, at least 19, or 20 contiguous nucleobases complementary to:
an equal length portion of nucleobases 4,743-4,767 of SEQ ID NO: 1;
wherein the modified oligonucleotide comprises at least one modification selected from a modified sugar moiety and a modified internucleoside linkage.

8. An oligomeric compound comprising a modified oligonucleotide consisting of 12 to 50 linked nucleosides and having a nucleobase sequence comprising at least 12, at least 13, at least 14, at least 15, at least 16, at least 17, at least 18, at least 19, or 20 contiguous nucleobases of a sequence selected from:
SEQ ID NO: 132, 228, 284, 330, or 440;
wherein the modified oligonucleotide comprises at least one modification selected from a modified sugar moiety and a modified internucleoside linkage.

9. The oligomeric compound of claim 7, wherein the nucleobase sequence of the modified oligonucleotide is at least 80%, 85%, 90%, 95%, or 100% complementary to any of the nucleobase sequences of SEQ ID NO: 1 or SEQ ID NO: 2 when measured across the entire nucleobase sequence of the modified oligonucleotide.

10. The oligomeric compound of claim 7, wherein the modified oligonucleotide consists of 12 to 20, 12 to 25, 12 to 30, 12 to 50, 13 to 20, 13 to 25, 13 to 30, 13 to 50, 14 to 20, 14 to 25, 14 to 30, 14 to 50, 15 to 20, 15 to 25, 15 to 30, 15 to 50, 16 to 18, 16 to 20, 16 to 25, 16 to 30, 16 to 50, 17 to 20, 17 to 25, 17 to 30, 17 to 50, 18 to 20, 18 to 25, 18 to 30, 18 to 50, 19 to 20, 19 to 25, 19 to 30, 19 to 50, 20 to 25, 20 to 30, 20 to 50, 21 to 25, 21 to 30, 21 to 50, 22 to 25, 22 to 30, 22 to 50, 23 to 25, 23 to 30, or 23 to 50 linked nucleosides.

11. (canceled)

12. (canceled)

13. The oligomeric compound of claim 7, wherein the modified sugar moiety comprises a bicyclic sugar moiety.

14. The oligomeric compound of claim 13, wherein the bicyclic sugar moiety comprises a 2′-4′ bridge selected from —O—CH₂—; and —O—CH(CH₃)—.

15. The oligomeric compound of claim 7, wherein the modified sugar moiety comprises a non-bicyclic modified sugar moiety.

16. (canceled)

17. The oligomeric compound of claim 15, wherein the non-bicyclic modified sugar moiety is a 2′-O(CH₂)₂—OCH₃ ribosyl sugar moiety, a 2′-OMe sugar moiety, or a 2′-F sugar moiety.

18. The oligomeric compound of claim 7, wherein the modified sugar moiety comprises a sugar surrogate.

19. (canceled)

20. (canceled)

21. (canceled)

22. The oligomeric compound of claim 7, wherein at least one internucleoside linkage is a phosphorothioate internucleoside linkage.

23. The oligomeric compound of claim 7, wherein the modified oligonucleotide comprises at least one phosphodiester internucleoside linkage.

24. The oligomeric compound of claim 7, wherein each internucleoside linkage is independently selected from a phosphodiester internucleoside linkage or a phosphorothioate internucleoside linkage.

25.-37. (canceled)

38. The oligomeric compound of claim 7, wherein the modified oligonucleotide is a gapmer.

39.-47. (canceled)

48. A population of oligomeric compounds of claim 7, wherein all of the phosphorothioate internucleoside linkages of the modified oligonucleotide are stereorandom.

49. An oligomeric duplex, comprising a first oligomeric compound and a second oligomeric compound comprising a second modified oligonucleotide, wherein the first oligomeric compound is the oligomeric compound of claim 7.

50.-88. (canceled)

89. A pharmaceutical composition comprising an oligomeric compound of claim 7, and a pharmaceutically acceptable diluent.

90. The pharmaceutical composition of claim 89, wherein the pharmaceutically acceptable diluent is artificial cerebrospinal fluid (aCSF) or PBS.

91. The pharmaceutical composition of claim 90, wherein the pharmaceutical composition consists essentially of the oligomeric compound and aCSF.

92. The pharmaceutical composition of claim 90, wherein the pharmaceutical composition consists essentially of the oligomeric compound and PBS.

93.-95. (canceled)

96. A method of treating a disease associated with PCDH19 comprising administering to a subject having or at risk for developing a disease associated with PCDH19 a therapeutically effective amount of an oligomeric compound of claim 7; and thereby treating the disease associated with PCDH19.

97.-109. (canceled)
